United States Patent Application Publication US 2007/0042382 A1 - sequence listing, part 5

SEQ ID NO: 8772 - DNA, 146778 bp, Homo sapiens
atttatccatttagccataggtcccaattttgactagagcttctgcagtcactaccacaaactggccactactgctaccagaagcattgttttgcaccagagatcagcaaatttttccataaaggtctaaatataatattattatattacaaatattttaggctttgttagatgtaatatcactgtttcaaatatccaaatctaccttgtatttgtgaaaggagccatagataaaatttgaatgattgaacgtggctgtgttccagtaaaaactctaattacaaaatcaggtggcaggccagattctacccacaggctgaccctagttttatactatctatccaatagttggtctttgtatcttatagaggcggaatatgaatacgacatgttgccaatatgatgagatggtctttatcccatgtcttagagtttaatgagttataccacaacagttgcttcatcttccaatatgaaaagaagcaaaacctcaggatccaccctacaggagtccctccaacagaattatcatcaagtgacactatctccagagttacgaatttgagatgagaagcaaacagtaacagaatttgaaaagaagattctcagttttctttgggaactaaaacttggttgcttttagaacccaggatacctttctgagggtgatccacaaactctgtctacctctgccgcctttttataagtttggcacaatttgaaagttttattctaccagcctttaaaaagttttattctaccagttatttggaagttgttttagaagagcgttggggatgtttggtggtctttggacataagtttctccatcctatttgttaggatggacaacaagctcactttttgccgtgactattctctgtcttatctataagtgcgtgtgtgcgggagcacgtacacacacacacacacacacacacacacacacgcgtgcgctgaggcagccaaacatcttcatagctgcttccctgatgtatatgcttgcctagaacttttacttgccagcttacaggactagtatcttcaacatgatactgagtttcatcaacagagaaggggactgggacacttttcgttgggcagttgcggatttctggtagactcactggcaaattgaagaggagtatgagcacaggtctttaagtacaacattatgtgtggtaaagtagtactgaaagttaagaaatcgcattgaatattgggagtagagtgagggtcaacagtgacaacttaaaggactctatgtttcactgttgctgagggaggaatgatgaccttgggtagatatttattcaaagaagagtattgtttctgattaaaaaaaagagggaggttgatagacacaaagaagcaaggaaagaatgtgtttttatgactaagggacattatcagtgttttagaaacactttatgcatggttaataaattcgtttgtcatataaaacaggcatttttgtgtattttggacaggcccatctaagtcacaggaacattattttgtgtaaaaatttaccagagtaactaaggtactagggaaaatagtttggtgccttaacaactccttatctgaggagttgccacagaattttctaaacattccccctatagaaagacttccagaaaagctcagtcagtaaacctttcaggctctctcccaaatatgttctgaatgtgtgcagatttttactgtcagttgcaccaaacttatacccattgaccatatcttgcctgggcttttgcagtagcgatttggctctactcttccttcccctggccagtcctgtctccacagagcagccaaaggctttttttttttttttcatttatttttattttcattagacagggtctctgtcacccaggttggggtacagtagcacaatcttggctcactgcagtcttgacttcccaggctcaagtgatcctccagctcagcctcctgagtagggagtagctgggactacaggcactcactaccatgcctggctaatttttgtgttttttgtagacacaggatttcgccatgttgctcaggctagtcttgaactcctgagctcaagtgattcgtctgccttggcctcccaaagtgcttggattataggcatatgccactgcacctggcccaaataggccttttgaaaacacaaatttgatcaagtaatttttctgcttcacaccctcctatggattcccatttccaatagaatataatcctaactccttgctgggcatagtgcagtacatgacctggcctctgctcaacgctccaactgcatcttgttcctctttcccctcggtgaggataactctctttctccaactacaccaaccttcttatcaaatatgccaagcttgtttccttccatcctaaggcttttgcatttgctgatccccacgcttgaagggctctgtctctagatattcacgtattttttccttcttatgctttgaatttcatttcaagcattatttcatcaaggatctttccagtccactcccaagcccatcattctgtttgattttcttcagagcacttttgccttcctgaaattattttgttaaattgtttcgtaaaagccttggatgatcttgacagaagatgaaaaagtgaaacaaggaggtaggtatgggtgggagccaggcatggggccagggtgcttttgaacatacgcaatgtgtctatgttttcttttgagaaaagatgggatatataaactaccatatgttttctgtggtttggttcttcactgctttgaacattctaacagtttatacatatttcaacaaaagaaagagaaagaacatgcatctgtctccaaaattattttaagtctctttcacatctatttgctaacctaatatcaactactgagaggcagtatagtgtagtggtctgaagctgactgaatccccattcttctgcttaccagctgtgaaatcttggggatgataaagcctatctgtacctgtgtcctatctgtaaaagtgggataacaatagtacttatcttaaacatttgttgagaggattacattagttaacagccctgtgttcctagaatgacctgtggcacatcataaatattcaacaactgttaactctaatttttaccagagaatagaaaacaatcctgccgcttgaagcttctcaagagaaatgaaagattgaaatttccatttccactccagatgaggtggcaggagtgatcagggctcctccccttacttttgaagccattcccaggttttgtccatagagcttcactactggcagatgtttttctgtctgtccttcttcaaactacttaaatagttggaaatagtgaaagaagtctcatcatcagcaactgagaagcagtacaagtaacatctgagaaattctaaaagggattttagaaaaaaatgttctgacttggttaccaagtgttgcgcgtgcatgcacgcatacacacacacacagacacacagacacacagacacacacacattttaaatatatctactcattcaacctagcaaaagaaaaggattccctcttaatcttaattgttgacttattttctttcttccttcaaccagacaaaatccatgagtagtaatttagactcttttgcttataacaatatctctaggacctagaaatatttggcatggagtaggtgctcaataaatatttcttgaatgaaataacaacatcagcaactctttgaggtaggtgctatgattatcctgtggtatatgtttaaaaatgaggttaattaacttgtccaagataacagctactcatgctagtgctgggttcagctagtgcttttaaacattccatagcattgcatcttgtttctccctttaaaatatcaatccacttaagtctttagtccatctggagttaatttttgtataaggtgtaaggaaggggtccagtttcaattttctgcatatggctagccagttctcccagcaccatttattaaataggaaatcatttcaggtttgtcaaaggtcagatggttgtagatgtgcggtcttgtttctgagatctcttttctgttccttggtcgatgtgtctgtttttgtaccagtaccatgctgttttggttactgtagccttgtagcatagtttgaagtttgggtatcatgatgcctgaagctttgttctttttgcttaggattatcttggctatatgtgtctatacttgtctttttggttccatatgaattttgaagtagttttttttcaaattctgtgaaaaatgttaatgatagtttaagactcaaatgtaaaacccaaaactataaaaaccctaggggaaaatctaggcaatattattcaggagataggcaagggtaaagatttcatgattaaaatgtcataagaaattgcaacaaaagcaaaaattgacaaatgagatctaattaaactaaagagcttctgcacagcaaaagaaactatcatccgagtgaacagacaacctacagaatgggagaaaatttttgcaatctatgcatcttacaaaggtctaatatccagactctacaaggaacttaaatttacaaaaaaaaaaaaagccattaaaaagtgacccaaggacatgaacagacacttctcgaaagaagatgtttatgcggccaacaaacattttaaaaagttcaacatcgctgatcattagagaaatgcaaatcaaaaccacattgagatatcatctcatgccagtcataatggtgattattaaaaagtcaagaaacaacagatgctggagaggttgtggacaaataggaatgcttttacactgttggtgggaatgtaaattggttcaattattgtagaagacacggtgataattcctcaaagatctagaaccagaaatactatttgagccagcaatccctttagtgggtatatatccaaacaaacataaatcattctgttataaagatatatgcatgtgtgtgttcattgcagcactattcacaatagcaaagacatggaatcaacccaaatgcccatcagtgatagactggataaagaaaatgtggtatatatacaccatgtaatactacacagccatgaaaaggaatgagatcatgtcctttgcagggacatggatggagctggaagccattatcctcagcaaactaatgcaggaacagaaaactaaacaccacatgtttctcactaatagtgggagctgaacaatgagaatacatggacacagggaggggaccaacacaaacttgagcctgtcagggagcagggagggagagcatcaggataaatagctaatgcacgtggggcttaatacctaggtgacgggttgataggtgcagcaaatcatcatggcacatttttacctatgtaacaaacctgcatgccctgcacatgtatcctggaatagaaaataaaataaaataaaataaataaatccaactatcttatccactccattacaaattacacctggatatgaccacctaattactttacatagcccctaatcttttactcatcccatccagctagaaagttactgatacaataatctgtagacactggttttcgcatctcagtctactgttcaaaaatgtcagtggcatcccatagaaatgaatatccttgtccgcatcaactctgttttcaagcttattcccgttttggtgtcattttttcttagatatccagctacactgaaagttgaactcatgctcaaatatatgtgtgtcagtttactcaatgagtacattaacatattatatttgatttacaagacacttgttaaaggtgccttaatcacgaaagaaaaaatctgagaaaattgaggctcagcaaagtttagtgccattaactgaggtttttcaacagggtattggagccaaagccacgtaagagttaactgtttgaaaaaacaaccaccaaaaaaaaaaaaaaaaaaaaaaagcaaggaggagcctctggttccaagtgagtacagtaatcttagaacctgttcccaagattataacctgctttatgcaaccatcagagccaaagaaacttaaccaaaggtttaaaacttacataaacaaagattcttttatttacaactctgcttctctgatgaacaagaagctgcagcttacacgtttgaggtgccttattcatactggctactcaatatgtaattttttaaaaaatctgttggtcttacagtatggaagcaaaaatgaatggtgatgttggtgaatgctaaggtaaaagtccttcatttatttgggttgttgtgggttgcaatttagtcatttgtacttggaaaaatataaggagatttaatgcttagttataagtataagattctttgggttttctaattatcttgtttatacattcctgacagcaatgacaattgtatttaatgcaggatttgttttgtgcggtagtaataatattgtttgtttatgcatgcacagatacagatttacattttgagttttcaaatatgtagttacaagtggcttggagcgttagaagtacatttaaatgattccggataatgttgttttcctcctgccttgtcattggcctggaaagtccctttttgtttatccagttcttccacaaccatcgttcaaattctgatcaagccccgtgttcttcacatgtctctctctctctggaaatctcagaacattagttgtctataacatacatatctacacacttaacactcacatatacacattctactggagttttcttttaaaattcaaaaatgagaacattattttttcaaagctaagtaacagaagagtatataaaaaagtcaattttgggcgtatctttttacatttctttctatgctcatgtaaaacatacatgatttatgtaattatacacatatgctcccccacaaccyttagtcacaaatacaggatcatcattacctacatatgtggacttgttgctgtaatcatttaactatgaactatggacatccctctaggtcagcatgtatatctaaatcrtggttagtccctaaatccttagataagaatatctatttctgcagaatggatttccaaaagtggaatgccagaaacattgtstactgcaatatgcaatcccatcacttctccaccccattccattgtatgtgataaatctttcaaaaaatttttaattaactgtatgcaaaaataagggtattgtgctacttttcaatcgcatttccttaaataccagtgagatttagcatcttttataaaaagattataataatttttgtctatttgcattttcctctcttataaaccccagttcatacaatttacccatgtttgctttttcttttcaatttgcagaagttctctattttacattagggttataaagctcacctctcatatacgtttcaaacatgttctctattttttaaaaacttatttatggtactttttgcctttgtataaatctgtactattaaagaagtagactccacaatttttttccattatagtttcttggttttttttttttgtcttttttaaaaaagtttttctttaacctaacattactcttayttttcacataatttttwcattttattttaacattaaaatccctaatccattgctctttttcatctttaaacatggattatgcaggaatattactattttcttgctgaatgaagatctaattataattataaaatcatttactaaagaagctatactttctctgctgagctattatatatttattatgtatatgtatatttctgctgaagtgtttatcatataatacattttcatttatatttatattggatacagttataaactcagttttgtacagtaactagtacaytttttgtggtcataacatgttattgtaatccaattaatatcacagaaggctttagtatcctatgtcaggtaccgatcatctttttcaatatttttaggtaaatcttacatatttattcttccatataaaattttaagtcaaacaaaaaagtagaaataaacaaaataaaaaatgattaaaattaaaaatcatttaaaattataaaggaaaatccaaataaaaattagtatctcaataaaattatgattaaaattgcattacatatttatacttatttaggaaagataaaggttttaataatattatggaggttttttggtccagtaagcatgataatttttcttaattcatgcaagatgaccttcaatataaaattttgtattcttcttcatacagttgcacatttttgttaaagttttctggggtactttattgttcgattgttattgtgaatgatattttatttttattttaatttttgtattatactgccagcataaagaaaagcctttggttttatatattttgtatcatgttgctgtatcaaattcttttattaattacaatataggaacttttttgtgatttacaagtattagtaattgtctataattaaatatattttgtttttaatttactgtatttatgtattattttcattttctcattttcttgtattagctaatgcaagaaataccacaacagtgatgaataataatgatattagctgggaacctttatttgttcctgattttttttttgtctttttttttattattatactttaagttttagggtacatgtgcacattgtgcaggttagttacatatgtatacatgtgccatgctggtgagctgcacccactaacttgtcatctagcattaggtatatctcccgatgctatccctcccccctccccccaccccacaacagtccccagagtgtgatattccccttcctgtgtccatgtgatctcattgttcaattcccacctatgagtgagaatatacggtgtttggttttttgttcttgcgatagtttactgagaatgatgatttccaatttcatccatgtccctacaaaggacatgaactcatcattttttatggctgcatagtattccatggtgtatatgtgccacattttcttaatccagtctatcattgttggacatttgggttggttccaagtctttgctattgtgaatagagccgcaataaacatacatgtgcatgtgtctttatagcagcatgatttatagtcgtttgggtatatacccagtaatgggatggctgggtcaaatggtatttctagttctagatccctgaggaatcgccacactgacttccacaatggttgaactagtttacagtcccaccaacagtgtaaaagtgttcctatttctccacatcctctccagcatctgttgcttcctgactttttaatgattgccattctaactggtgtgagatggtatctcattgtggttttgatttgcatttctctgatggccagtgatgatgagcattttttcacatgttttttagctgcataaatgtcttcttttgagaagtgtctgttcatgtccttcgcccactttttgatggggttgtttgtttttttcttgtaaatttgtttgagcccattgtagattctggatattagccctttgtcagatgagtaggttgcgaaaatttcctcccattttgtaggttgcctgttcactctgatggtagtttctttcgctgtgcagaagctctttagtttaattagatcccatttgtcaattttgtcttttgttgccattgcttttggtgttttagacatgaagtccttgccaatgcctatgtcctgaatggtaatgcctagcttttcttctagggtttttatggttttaggtctaacgtttaagtctttaatccatcttgaattgatttttgtataaggtgtaaggaagggatccagtttcagctttctacatatggctagccagttttcccagcaccatttattaaatagggaatcctttccccattgcttgttttcctcaggtttgtcaaagatcagatagttgtagatatgtggcgttatttctgagggctctgttttgttccattgatctatatctctgttttggtaccagtaccatgctgttttggttactgtagccttgtagtatagtttgaagtcaggtagtgtgatgcctccagctttgttcttttggcttaggattgacttggcgatgcgggctcttttttggttccatatgaactttaaagtagttttttccaattctgtgaagaaagtcattggtagcttgatggggatggcattgaatctgtaaattaccttgggcagtatggccattttcacgatattgattcttcctacccatgagcatggaatgttcttccatttgtttgtatcctcttttatttccttgagcagtggtttgtagttctccttgaagaggtccttcacatcccttgtaagttggattcctaggtattttattctctttgaagcaattgtgaatgggagttcactcatgatttggctctctgtttgtctgttgttggtgtataagaatgcttgtgatttttgtacattgattttgtatcctgagactttgctgaagttgcttatcagcttaaggagattttgggctgagatgatggggttttctagatatacaatcatgtcatctgcaaacagggacaatttgacttcctcttttcctaattgaataccctttatttccttctcctgcctaattgccctggccagaacttccaacactctgttgaataggagtggtgagagagggcatccctgtcttgtgccagttttcaaagggaatgcttccagtttttgtccattcagtatgacattggctgtgggtttgtcatagatagctcttattattttgaaatacgtcccatcaatacctaatttattgagagtttttagcatgaagggttgttgaattttgtcaaaggccttttctgcatctattgagataatcatgtggtttttgtctttggctctgtttatatgctggattacatttattgatttgcgtatattgaaccagccttgcatcccagggatgaagcccacttgatcatggtggataagctttttgatgtgctgctggattcggtttgccagtattttattgaggatttttgcatcaatgttcatcaaggatattggtctaagaatctctttttttgttgtgtctctgcctggctttggtatcagaatgatgctggcctcataaaatgagttagggaggattccgtctttttctattgattggaatagtttcagaaggaatggtaccagttcctccttgtacctctggtagaattcrgctgtgaatccatctggtcctggactcttttttgttggtaagctattgattattgccacaatttcagmtcctgttattggtctattcagagattcaacttcttccttgtttagtcttgggagagtgtatgtgtccaggaatttatccatttcttctagattttctagtttatttgcgtagaggtgtttgtagtattctctgatggtagtttgtgtttctgtgggatcggtggtgacatcccctttatcattttttattgcatctatttgattcttctctctttttttctttattagtcttgctagtggtctatcaattttgttgatcctttcaaaaaaccagctcctggattcattaattttttgaagggttttttgtgtctctatttccttcagttctgctctgattttagttatttcttgccttctgctagcttttgaatgtgtttgctcttgcttttctagttcttttaattgtgatgttagggtgtcaattttggatctttcctgctttctcttgtgggcatttagtgctataaatttccctctacacactgctttgaatgcgtcccagagattctggtatgttgtgtctttgttctcgttggtttcaaagaacatctttatttctgccttcatttcgttatgtacccagtagtcattcaggagcaggttgttcagtttccatgtagttgagcggttttgagtgagattcttaatcctgagttctagtttgattgcactgtggtctgagagatagtttgttataatttctgttcttttccatttgctgaggagagctttacttcccagtatgtggtcaatttaggaataggtgtggtgtggtgctgaaaaaaatgtatattctgttgatttggggtggagggttctgtagatgtctattaggtccgcttggtgcagagctgagttcagttcctgggtatccttgttgactttctgtctcgttgatctgtctaatgttgacagtggggtgttaaagtctcccattattaatgtgtgggagtctaaatctctttgtaggtcactcaggacttgctttatgaatcttggtgctcctgtattgggtgcacatatatttaggatagttagctcttcttgttgaattgatccctttaccattatgtaatggccttctttgtctcttttgatctttgttggtttaaagtctgttttatcagagactaggattgcaacccctgcctttttttgttttccatttgcttggtagatcttcctccatccttttattttgagcctatgtgtgtctctgcacgtgagatgggtctcccgaatactgcacactgatgggtcttgactctttatccaatttgccagtctgtgtcttttaattggagcatttagtccatttacatttaaagttaatattgttatgtgtgaatttgatcctgtcattatgatgttagctggttattttgctcgttagttgatgcagtttcttcctagtctcgatggtctttacattttgccatgattttgcagcagctggtaccagtcgttcctttccatgtttagtgcttccttcaggagctcttgtaaggcaggcctggtggtgacaaaatctctcagcatttgtttgtctgtaaagtattttatttctccttcacttatgaagcttagtttggctggatatgaaattctgggttgaaaattcttttctttaagaaatttgaatattagcccccactctcttctggsttgtagggtttctgctgagagatccacttttagtctgatgggcttccctttgagggtaacccgacctttctctctggctgcccttaacattttttccttcatttcacctttggtgaatctgacaattatgtgtcttggagttgctcttctcgaggagtatctttgyggcgttctctgtatttcctgaatctgaacgttggcctgccttgctagaytggggaagttgtcctggataatatcctgcagagtgttttccaacttggttccattctccccatcactttcaggtacaccaatcagacgtagatttggtcttttcacatagtcccatatttcttggaggctttgctcatttctttttattcttttttctctaaacttcccttctcacttcatttcattcatttcatcttccatcgctgataccgtttcttccagttgatcgcatcggctcctgaggcttctgcattcttcacgtagttctcgagccttggttttcagctccatcagctcctttaagcacttctctgtattggttattctagttatacattcttctaaattttttcagagttttcaacttctttgcctttggtttgaatgtcctcccgtagctcagagtaatttgatcgtctgaagccttcttctctcagctcgtcaaagtcattctccatccagctttgttccgttgctggtgaggaactgcgttcctttggaggaggagaggcgctctgctttttagagtttccagtttttctgttctgttttttccccatctttgtggttttatctacttttggtctttgatgatggtgatgtacagatgggtttttggtgtggatgtcctttctgtttgttagttttccttccaacagagaggaccctcagctgcaggtctgttggagtaccctgccgtttgaggtgtcagtgtgcccctgctggggggtgcctcccagttaggctgctcgggggtcaggggtcagggacccacttgaggaggcagtctgcccgttctcagatgtccagctgcgtgctgggagacccactgctctcttcaaagctgtcagacagggacatttaagtctgcagaggttactgctgtctttttgtttgtctgtgccctgcccccagaggtggagcctacagaggcaggcaggccttcttgagctgtggtgggctccacccagttcgagcttcacagctgctttgtttacctaatcaagcctgggcaatggcgggcgcccctcccccagcctcgctgctgccttgcagtttgatctcagactgctgtgctagcaatcagcgagactccatgggcgtaggaccctccgagccaggtgcgggatataatcttgtggcgcgccgttttttaagcctgttggaagagcgcagtattcgggtgggagtgacccgattttccaggtgcgtcagtcacccctttctttgactcagaaagggaactccctgaccccttgggcttcccaagtgaggcaatgcctcaccctgctttggcttgcgcacggtgcgcgcacccactgacctgcgcccattgtctggcactccctagtgagatgaacccggtacctcagatggaaatgcagaaatcacccgtcttctgcgtcgctcacgctgggagctgtgcaccggagctgttcctatttggccatcttggctcctctccccttgttcctgattttaatgggactaccttggttatttcacagcacacttacggtgctttgtgaagtgcctgctatgttactatcatcatcttcctgacaagatggtaagcaattgttagtgaaatagtagtggaaggatctgttattttatgtgaattaatctttttagcaattgatattattggcttgagtgtaccacccactcccaggtgttgagaaatatctaaatatctgaagaaaaaaactgttatacaagcctctcgatgggataatttactattccccaggaccagcattctaagcactttttcttctctgtgcacagtagattttgtggaggtggccgtatcaccttgttcaggaatagcttgctctaactgcagtatgtctccctgcacttttctttttcttttttttttgttttttgttgkgtgtgtgtgtgtgtgtgtkcgtgtgttatttttgagacagtgtctctctctgtcacccaggctggagtgtggtggtacgatcacagctcacttgcagcctctacctcctgagctaaagagatcctcccatctcagcctccccagtagctgggactacaggcatgcactaccacttctggctaatgtgtgtgtgtgtgtgtgtgtgtgtgtaaagatgtggtttcatcatgttgccaaggctggtctcaaactcctggacttaaataatctgcccaccttggcctaccaaagtgctgggatcacagcccactgcactgacccaacatttcatattgttgctgagccactaaggcaagctgaccagaatgggaagaaagacatacatagacagtgtcttttgaagcactgtcttgttcatgggcccgtgtttctttcttgaaatctattagcacctgatctggaaaggcagttttcacttacagaaaccctagttttatcttgtctctatgaaggtcactgtgcaatattgaaccatggctgtgctctgcttattgctagattgatacaaggtttattatcagttctgttattgttttatagaggtaagcactaggaaatatgtttacatgaagatgttgttgaaggaaggcattttactacagtaatgtcgcttggttatttgaaccctctgtagttacatgtcaaaattcaaattgtgttgcaatatcaaaaattactgtsaattgataagttggttttctttcaagtttgttgaaaacaatcaaaatttttacagaagaatatgttagttattagaatctttcattttgccaatttctgagatatataccttacaattttatctagattgaaaaaaggattastaaccgtatctgtttatctcttacagtcacctggtttttgaagctacaagtagattatatcagcctaaaaaaattaaattgggcattgtctattgcagaattttctttgataagctgagcaaagatttatttatctttgccaaattaaaaatttttaatccggctggtctctaagcagcttcaaaaatcttgacagagcaacagaaataaatatttttgagaattttatatctatattgattagaatttctttcacaattgaaaatggttgtttcttattatgcatctaatagaatcagtgtatatcattctctgaacaggagtaattaatcttaaataaaggaaactggttttctaaggtttagtgcattgttacctagattgcttttggggatgcaatgaaaatcactgtgcagtgtgaaccatggctgtgttctacttattgctagattgatagaaggtttattatcggttctgttcttattatgtgatcttgatctttatctgcatatacatatatatatattctgattttaaatgtacaatgaaatcttctgttagaaaattaactacaaaacctaaggtatttggccagtgctaaacaagagacttagagaaatatggtctcatgtgattctgcyccaggaggcatgaattatttgataataggagaggaggatgaaatgtgccacagtaagatttagaataggtgagagataagtccttccttttgtaacatttggaaaggaaattatgcaggggtcaagggttgggaaagaaggactagcatgatgactaaacttaagatacattttcagagaggttggcttttcaaaagggtctacatggaaaatgaagaattgaaagtgacttctcttaaaactattcatgttcatgtacccattggaaaattttatgcattctaaatattcatataccttggtttggagaacctattttagaccacctagggaacttgtaaaagaaatgtacaagaagaggttttatgaaaactctcattgccagcatgtgtaacaggttgtagaggtagagaggtgcactagagatcaaagggtagagataaaaataaaagtcrtttctgtagagagagttgtgctgtgtgtcccactttcacttctgttagggggaggtaagctattctttcttctgatttaaagcctagtgagcatgactttaagtttgctcagagtgctttatatttgtcctctgcagtttgggagacacaggggactggtgtccaattcatacttmggaaatttaagaagcctaaaaggcaaaaaggctgtggctggatccacctgccaggaggtgaattgaagagagggctacatttgaaaaggagcttcaccccagccagcgatgggttacccagagctactttggggctcttacatctagaatgattggatcatatggagtggtgatgagagtttagtagaaagaggctaaaagtgtatgttgaatatctaaagttgcagggagaaattgtatgtgattagtcagaggcgatgcatttaccccaccaaagatactgcagatgtcagaccatgaatgaggggtggaatctccaaagaatccaagaaagtggccttaagagaaagagtcagttttaaatactgctctgggcaaaggaatcaaggaagacatttcttccttcattaactcttcccctttaaatttcaactctagaggagatagagcagctttgttcaattgtgggagaaaaaggaaggcagaaggagagaaactaggatgaaaaatagagaaataacctagaccttctttctcaaatgtaggctttggacctgatgtagtgggagggaaggagatttggtttacgtaaagtgcaaagtgaactagacatattaatccagaactgcaccttttgggggaactaaaagtgaccagagggtgttttgcttttttttttttcttttgaatgtcaacggaaagtagtgcagcctgtttgagattacagtgtcagtggaatttaaaaaaaatggacctataaaatgaatttgataggcagtggaggaagaactagcttcttttctgatgtcaccacataaatcccatttgttcaaggtacctgcacttactatccttttcaaatgtaaatattccttgggagtacaacagtacattatcgcaacttttgagtatttttcaataatacattatgctcagaaagacaccaggattataatttttccttcctgcaactcttctttcacttcagcatgctgttactagtttttcagcttatatatatattttgccatttaactaacagacaacttcatgaatcatacaatagattttgtttcagaggcatgtcatcagctccacgagactgaaattgataaggacagtcaaagcatttgaatcaaatttgggctcctctataaatgggtatttttaaaggagaattcatcacttatagtaatgctgtaaatcttggtgttaaaatccatgctaaatgggactcattggtagggctgtctaatatctaaattcagtatgaactataatgtcagaaaaatctttgattttgctgtgatatgttgttacatttacatggaaaatttcagaaatttacacattttatatctctcaaaatagttgtttcttgtaagacagaaaacaagtaagtgttcaaagacatgtcccacctttgaaatgaggacagaaaatagaatgtggcttaggggttacttaatacagctactcagaggcagaacaaagacaagacagagctgaaggctgacaacttttcagtgaatttgtctagcagcwggagctaccaattattgaaatttataacatttcaggctctctaagagggactttacataatttatctcatttttttatatgctatgtggatatctaatctttttaggattcagcaaaagaagatttagatatctcctatttgagtcaattctaggaagcctaagagatctaccaagatggccccttggcaatcaccaaagcatcagaaatatttctgttatttgggtttaaaagttagtatcaattccattgttgcagtagcagcttgggtgttccaaaatgtcatccaagtacagtatatgatgtaaatgtttgcaagacaggaaaaaaaataggaaaatgtagactaggaaatgtgttgggggaattgagaagttgaaggacaagaaaatagtatctttattcttccacaaccacattttacaaaccttatcatcattttaactataaatatatttgtatttcagatttttaaaaggctatctttcaaaagtttaccttcttttcctttttgtggacattagacactgtttaaggtccatatgacaatgttcgttgagtaaaataaagtatgcaacagtaatttagaaactcakatctatgtaagtttatttaagtttggccatatggtcagatgcctcctgacactacaaatatctttctgttatttaaaattttctataaaactctagcagtaaatagttggtaatgtgaacatagttcaccaacatttttgtcttacaagttacacatttttgatagtaactgtataattccatctatttttataagaatataacatggtgatctagcgtaacagtatacatttatttgcattttaaaatgaagaagcagtatgtaaatattaggctagtgcaaaagtaattgtgtctttttgccattaaaagcaatttaattttaacataaaagtatattagtaatatactataattatataatataattagtaatataatagaattatataataaaaacccataggaagcattttattttgaagaagaaaccagatagtttatttttcctactcattttctttcttgtatctctgtgggtgcatgagtctttttcttcatttcttagtggcacttatgccatttgtgatttgtatgtgtgtgcctactctttatgctgtaaatcttggtgttaaaatccatcctagatgggacccattggttggtctgtctaatatctaaattcaatatgaactataatgtcatgtcaaaaaatctttgattttgctatattttgttccatttacatgaaaaaataagttcttcatatggatacataagagtgcagaggttagactgtattttgagtttctggtttccagttgggacattgatcatttgttaacttaagatcttagcttgtgaataagtcttatctgcattggataagacttaataagtcttatctgcatctggatcttagcttgttaataagtcttatctgcataacattttgaccatatttgtgggtatttctacagactaagttaagttttaaatatatatttctaagaaaagtgagaaagaaaaacgtgtaggcagtaataacataagctttgcagaggctaatttccagatacaaacatatagtacaatgtacctgtaataattataactatttttgacaagtaaattgatatcttgttgccttcctttattatagatgaaaaaacagtttacctcagattactggtcacagtgaycctaactcatatttggttgtaaggtagtacattacccattttaggttattcagctcctaaactcgcaaatattgacagggcaacatgtaccacagatgtgtgagattttaaagctattgaagaggytcagtacattgtgtcttaaaaatagtcacatttaagcatccattggattgctgtattatggtatttacaatgatgaggtacaaaagggtctaggtctatgtttgcatatactctggaagacaaatcctacatttgcagcattttaccagttgcagctattagaatctcctaaatatcttaacctgtgggcttacatattttcttatttttttttcagaagtcttagaatcaagaaagggccatatatgaaagtagtgaagtggcataatattttttaatatttcatgctttggtcaatgccacagtaccctagaattttagtaatgattacagttaaaaattagtgttgtattgctagatgtattagtcyattttcatactgctataaagaaatacccaagactgggcaatttataaataaagagagatttaagggactcatagttccacatggctggggaggcctcacaatcatggcagaagaaggaggagcaaaggacatcttacatggtggcaggcaagagaaaagtacaaaggaactgccctttatacaatcatcagatcttgtgaaatgtcactatcacaagaacggcatgggaaaaaccgcccccatgattcaattacctcccactgggtcccttccatgacacatggggattatgggagctacaattcaaaatgagatttgggtggagacacagccaaatcatatcattctgcccctggtccctcccaaatcttatgtcctcacatttcaaaacacaatgtgcccttccaacagtcccccaaagtcttaactcatttcagcattaactcaaaagtccaagtccaaagtcttatcagagataaggcaaatcccttttgtctatgagcctgcaaaatcaaaascaagttacttcctagatacaataggggtacagacattgggtaaatatacccattccaaatgggagaaattggccaaaacaaaggggctacaggcccaacataartctaaaatccaatgggcagtcattaaaccttaacattccaaaatgatctcctttgactccatgtctcacatacaggtcgtgctgatgcaagaggtgggcttccatggccttgggcatcttcacctctgtggttttgtaggatacagtgctctttctggctgattttatgggctggtgttgcgtgtctgtggcttttccaggtgcacggtgcaagctgtcggtggatctaccattctggggtctggaggacagtggccctcttctcacagctccactaggcagtatyccattggggactctgtgggggcgctccaacccygcatgtcccttctgcactgcgctagcaggggtccatgagggccctgcccttacaacaaacctctgcctggacatccaggtgtttccacacatcttctgaaatctaggtggagsttcccaaacctcaattcttgacttctgtgccccgtagggtcaataccatrcggaagctgccaaggcttggagtttgcatcctctgaagccaagcttgagctgtaccttggccccttttagccatgattggagtgcctgggatgtagggcaycaagttccaagggtgtacacagcaggagggccctggacctggcccaggaaatcatttttcctccctaggcctcagggcctgggatgggaggggctgctgtgaaggtctctgacatgtcctggagacattttctccatcatcttgrtgattagcatttggcttcttgttacttacgcaaatttctgcagctggcttgaatttgtccccagaaaatgggtttttcttttctactgcaatgtcaggctgcaagttttccaaacttttatgctctgtcatctcttgaatgctttgctgcttagaaattttttccaccagawaccctaaatcatctctctcaagttcaaaattctctagggcmggggcaaaaagccagcagtctctttgctaaagcatagcaagagtcacctttgctctagttcccaagaagttcctcatctccatctgagaccacctcagcctggacttcattgtccatatcactatcggtgttttgatcaaagccattcaacaagtctctaggaagttccaaactttccaacattttcctgtctccaaagccctgcaagtctctaggaagttccaaacattctcacattttcctgtcttctcttcaacccatcaaactattccaacctctgcttgttacccagttccaaagttgcttccacatttttaggtatatttacagcagtgccccactaatcccggtaccaatttactgctttagtccattttcatactgctgtgaagaaatacctgagactgggtaatttataaagaaaaagagatttaatggactcacagttccacatggctgggggggccacacaatcatggcagaaggtgaaggagaagcaaacacacgtcttacatggcaaaaggcaagagagaagtgcagggtaattgccctttataaaaccatcagatctcgtgagacttattcactatcatgagaacagtgtgggaataacccacctccatgattcaattacctcccacctggcccctcccgcaatatgtgggggttatgggagygacaattcaagatgagattttggtggggacacagccaaaccatatcactagggattgttatatgctaagggctttttatacattatttcatcctcatatctttgcaaggcagatattgtttttttaatatataaataagaaaactgaagcaaaaataagccaagaaatgtattcaaagttttaaaaaagtatcctaacaaaggtctgcctgattccaaaaatcctgtctttcccattgcaccaatgaccctactatagtatctttcagtatcctattgactttttgctctttggcatcacagcaggacattctttacattttaaattttacttcaatatgaaagttgaaaacacttagacaatatctcttggcatagccagataataatcataaacttgaaatcaaataaagctctgaaaactgagtttgaatatctgggtactccaagggcttggttctggttcatatcctcttttattttccagtggcttttctgcaggaggggttctggaaaaatatggtttctaagcacctcgtaaggatcaaatactgttttcagaaggctgatgaagcttcagaaaaacaaatctgtttctgttgtcttgctcctttccctgtcttgtcatgccagcctcctctacccatcctccaggttaacatattaggatttcaaaaccagagtggaatagatgctttaaatccttatcacacccagctgtgtgaagaaaagtgattgcaaatgtatatgggtctcaaagcccaaccagagacattgtacggtaataggactccttcatgcccttctcttttgctctttttccgttttgctttcctcacagtttacccctaccagtcctctaccaatgttcttgcttaaggtgcctatcctgttctcttagagctttgctcttaaccagctgttagctaacttcaactgttagttgatattgatgagagtttttatttcaagaaggatttgtcttttaatgagagattcttcaactgaaaagcacttatgcacaagaatgaatttcaaattatagaaggttatggagtaaattctggacagagtttctgctcaagatctgttgcttgatcaggttatttgtatttacaaagtggaggcatggagtcaatacaaagaagtgagtgatcagaaaccagaagagagttttataacagttatagctgtatgtgggaccacagcctcctagctttcacgtaaacttatactaaattttcagcatttcaattgcagaggtttcatatttatatatttatatgataatcagggcattatgtccatgaaggtaaaaaagagtttttaaaaaaaatctggccgggcgaagtggttcacgcctgtaatcccagcactttgggaggccgagacggacggatgacgaggtcaggagatcgagaccatcctggctaacaaggtgaaaccccgtctctactaaaaatacaaaaaattagctcggcatggtggcgggagcctgtagtcccagctactcgggaagccgaggctggagaatggcgtgaacctggaaggcggagcttgaagtgagccgagatcgcgccaccgctctccagcctgagtgacagaacgagactccgactcaaaaaaaaaaaaaagaaaaaaaaactaagtggacatatttttttgatatatttaatttttctttttataatgcctttccatgatttcaagttttaaaaagtttattaatgcagtttgttatctatgtggtaagatttctaactacttaaattatacctttttagtattttagattttcttcctgctattctaatctacttacaaccctgataaacttaccagatatgctgtttctatattgtctgtgatatccttttaagggtttgtgtgccacttcctactgatgataacctttgttctaaataccataaggaatgttcccacagagaagtggtggattttcagagccagtatctttatggttctttaagcatttcgtaattctagatgtggttgtgcggtacaagtttctttgtgtcattttgttattggagcagggaaggtatctacttatgcaaatctcatttaggatttgggtagattaatttcattattctattttcctttttgttcatctttgaagctttctctgcattgttttgtacccgcttttgtgactgacttttttttcttctctgtctcttttaaaattcttaataaaatgaatttagaaagtacccactgtaataccatactgttctttggtttgtgtagttatcattgttaattcagttatcactgattggacattaaaaatataccagatactttgcatattttatttctaatcttcaagaaaactattcaagatagatattactatccgttttacaaagggagtataagatgccacactctatcaacttaatcacactgtattaaattataaatttatattaaaataatttgttttttcattattcctagagtaaatgtattcaaccaatatgtattgtgcatctgttataggcacataatgggcttaaatgttgtggggattacagagatgactcatacatccttcacctcagttagtttacaggctggatggggaaataacacttgagcatacataaccaaaaaataaggtagaaccygtgaacttcttctaggtggtctcaaaatcccaaccactaatatcatatcaaatataaaaataagctcactaaacatgttcagtgactgagggaatgtctatgtaaattcaggacctgtatttacatagactcttatctgtgtgagactcttatctatgtatgacggaaagaatcatgataggctccatggacagtgtggtctttgagcagaaccagggtacagtgtagatcccagaggtgaggaaaggatatttcaaggcagcaagttgtataaagcaagaacgtggaggcaggtgagtgtggggtatgggatggttaatgcacaagggaagcagtaatgaggcagatgaaaatatagaccaaaattccatggggaggacgttaagggaccagctataggatgtgggtctacttagtcggcaaaggttttattgaaccatagaagaaaatgttctyagttgtatacggaacaaagaaaataggacaatcccatttggattttggaagaaaaaaaagatgtgctaccagcaatctttcagtgttggaaatatttartaagtgtattgaattttttttaactttcttccagttaaaaccttaaaaaacaaaataaaacaaagcaaaagtatctcataatgggtagggtaaagattgttattctcaatatcagacaaagtgaataactattttagtcccattcttcttttgcctgacctgtgtgtccagtttcaagacagactgatttggcatggtctgacatttaataaaacacagtgcaaagtgggagtaaaagaaaaatatttttatttggacatgatgtagagaaattgtctgcacttcagagtcaatatacctgagtttcaatcctgaatccatcctgactatgtgatcttagataagtcagctcattttctttctttcttttttcgtttcttttctttctttttttttttttttttgagacggagtttcttctgtcgcccaggctggagtgtagtggcatgatcttggctcactgcaacctctgcctcccaggttcaagcgactctcccgtctcagcctcccaagtatctgggattagagacttccaccatcattcccggctaatttttgtatttttgtagagacggggtttcaccatgttgtccaggcttgtcttgaactcctgaccttgtgatccgcccacctcggcctcccaaagtgctgggattacaggtgtgaaccaccgcatcagccattttctttcttaaaaatttattatcatttctttatttcaatagcttttggggtacaagtggtttttggttacaccgatgaattatatagtggtgaattttaacattttagtgtacctgtcacccaagaagcgtacattatatctgactgatggttctttattcctggccccctctcaccctcccscttctgaatctctaaagtccattatatcactctgtgtgcctttgcataactgatagcttagctcccccttgtaagtgagaacatacagtttttggttttccactcttgttgttacttcgcttagaataatggtctccagctccatccaagttgctgcaaaagacattatttcattccttttaatggctgagtagtatcccatagtgggtaaataccatattttctttatccactcattagttgatgggcacttaggttggcttcacacctttgcaactgtkaattgtactgctataaacatatgtgtgcaagtgtgtttttcatataatcactgctcttcctttggttagatactcaatactgggattactgtatcaaattgtagatgtacttttakctctttaaggaatctccatattcttttccagagaggttgtactaatttacattctcactagcattgtgtaagcatttctttttccccacatttacacgaatatctattgtttttctacttttttcttttttttctttttgagacggagtctcgctctgtagccaggctggagtgcagtggcatgatcttggctcactgcaacctctgcctcccgggttcaagtgattctctttcctcagcctcccaagtagctgggactacaggcacatgccaccatgcccggctaattttttgtattttagtagagatgggatttcaccatgttggccggaatggtctccatctcctgacctcatgatctgcctgcctcagcctcccaaagtgccgggattacagctgtgagccaccacgcccagcctgttttttgactttttaataatggacattcttgcaggagtaaggtggtatctcactgtggttttgatttgcatttccctgatgattagtgatgttgcgcatttttttcatgtttgttggccatttgtatatctttttttaagtaaatgtctattcatgtcctttgcccacttttcaatgggattatttatttttttcttgctgatttgttcgagttccttttagattctggatactagttctttatcggatgggtagtttgcaaatattttctccgattctgtgggttgtctgtttactctgtttattatttctcctgctgtgcagaagctttttagtttaattacatcccatttatttatttttgtttttgttgcatttatttttgggatcatataccagttaaactctgtcattttttctcatagtgtacatacttaagcccactcacccaacttctgagatcttatctggaagctgccgatcatcagttttaggtgttttctacctattgggagtctacctttctctggtgctggctacgaccagttattattttagagagacaatttaacaatcacctgaccatcagctgatagtcgcctgataattcttggtcgggggctggggcagtgggggcatgggggtgtgggttgggttggggggccctctcttccctgctcatggttgcctagctacccattctagcacttggaagcctaactcactcaggttactcaagggtacctatgatttcatgtacctagacacaatgagaaaggttaagataaacgtagtcaccaaaattttactgttggtacctccaattacaataatttagttattctcattatttttttcccaaagtagttgtgagaaaccagagaatacactcagtaagctccctggcagtaatgtattctcagtctttatgtatttgattccttactgagctgcaaataccaacctaactaaggaaataatgctgaatttgtttaaatgtttcactttcgtaagaaattgaatgaataaacttcagaataaaatcttcgattaatatctgctgtatccatataataacctttgtgttatagartcactctaactatgttttaatctctagcaccagaggttgttgggttactattcataattcttcttgtttaattcctgggaattgtatgctaccataggcaatgtccttgaacatgatatgcactcattaaaattttgttaacactagaaagagagatgggggaattgaaataaattataatgttaartaacaaatccatatatgtaatatttataaacctaaatataatgttgatattataacttgacatattataaattacatattttgttatacctatttatatcatatataggtgtgatatgcaataaaactgtagactattgtgggaaatttttcaaataagtttgagagattataatttaattgtaccttattcaatttgaaatattgggtttgaggccactttgaaagaaggaccaacaattgagcatcacaaatataaatttgtatattcacctatttatttcaatatgtaattcatgacatagaatttattataaatatatttccctgcctctatacactcactaccgctaccacttaccaccaccaacgaaagcctctacaatttggtaacctaaggcacacttcataaagggaaattttaacttagaaatgtaagtcaatgagtcaaatttccacttagattgaaatgcttattttttctatttttttaaaagtacaagttgagtgtctttagaaatggcataacgcagcatgatggcagtttatctgaattaatgctacttccaaagctacctaactcaaagtcagggaaaagcagatattcataagaatctgactsaaagcaaagcatttcatcttctgtccaacattgcagctgctatcaaaaaaagtgtatcatatacataacctctgccagaaatgtctaatttgttaaacaaaagaaataattcttatacagcaaagagtttccagaagtctgtggtcttttaattgaagacacgattaatagaacacaagttgtttcgcaataccctgcataagaatatgactgaggtttgckgaaagccacttaaacaaaataaatgacatatacatttaatagaagctcactgctgctaacacacaatgaaaccctcatggatacaaagcagttttatacttttaaatwgcctcttagtaccagcaagcacaacraacaatagactttaaaaaatattttgaccgagtcaggagcaggattttatttmtttgtttttaaaacagcattctgtcatttcagaaatayactgcaaaaaggaattgcttaacaggggtattgacaattactaatttgcttatcaggggtacttacaattactaattttctttcttttttttgagacgagtctcactctgccacccaggctggagtgcagtggtgcaatctcggctcactgcaacctccgcctcctgggtttaagcgattctcctgccttagcctcctgagtagctgggattacaggcacatgtcaccacccccggctaatttytgtattttyagtagagacagggtttcaccatgttggtcaggctggtctcgaactcctgaccttgtgatctgcctgcctcggcctcccaaagtgctgggattacaggcaagagccaccgcgcctggtccaattactgattttctcatgtcaagaataacttcattattagctgtttacaatttaccaaggttcaaactacctttttctccttcgttcttaaacctgtgccactgagatataggtcccaaaatgacgttcttatgttttaaaatacaaatctatagcaaaaacatttcattttaaaagatactatctttttattatgggaccttagttagtactacatataaaacaatcttttgagaaggtatatgtcctagcaacaaacatcagacacacagaccatatattcacactgragatgaaaagggcactgttaaattatacaggaaatcactagaacataaaacaataactatagagttacattgtcctctaaaggggcaagtaattcagtggctctctctttaaaacctctactgcattcctcttgccatatgtattggatcccacgttggtagatgagagaatggcaccaaagttgttgcyggaatgaactaaaaaatttgccaggcgctgcgttgcacatgtggcagtgttgcatttccgcttttccacctgatgactggtaacatggaacaaatgtgaaaagttagagccttagaattttagctggatccagccatgtgacatcaaatatcttgtattgatgaaaaccaaagaaacaattttcacataagtaactcagtgttttggtttgcaaacacctagatggctgagatttttttttgacaccttgaaataacaattgaaaatcatacaacatctttcattacagtcaatgttgcatttctcagttaaaagtcttcctttggaaattcagaatatattacatataatcaaaataacagtgtctttgtcttacatttttaaaaatcttgaagaatttatttttaatatataaaaagaatttagaaggtaaaatttatatgtaatctgaaatatgaagaaatttaaaaataattatttctacatctttccaataagaataaagcagcattacttagtctttaagttccttgagataattgaatcaggagtgttatgcaagaaatgtcataagggaattctgcaatatgcaacacacggatgaaccttgaggacattaggttgagtgaaagaagctagtcatagaaagataaataccacttggttccatgtatatgaagtatttaaaatagtcaaattcatgagttaaagagtggaatggtggttatcaggggcaagggagagggggaaatagggagttactaaccattgggtgtacagcttcagtcaagcaagatgactaagctctagagatctgctgcccaacattttgcacataatccagaataatgtattgcatgcttaaaaatttgttaaaagggtagatatcatgctttgttcttaaaacaataaaatgaaatataataaagtaaaaaataatgtcataaaaagtatgtcaaaaaaagagaatatcataaagtctccaaaagaatcaaatctatcacctgttcaggtactctattgcagtgtgagagttttattacttttagcataaatacattttcctgcttggatcttatgctttcaagaattttaatgataagactaggttaaatgttaaaaccaaaagactttttatgtcaatggtattaatattcatcacatttttctagccacctggaagaagtgcataataatacttataaactcagaaatcataaccacacattaaataattcatttaattttaacttatgtttttatttaagacatttatttgtataccaactctatttttttgacagccttttgtttcaatgtgcttttaaaacgatatcggaaatggatgcagaataataacattgsttcctctttgctgattattaggaaagttagagaaatgttttagttttcagctccatagaaatcaaaatattggtgaaacttagggtaaatggaaaatgaaatagttatagggctaaaaactcaatgtccaggagccagtggatatgcataatctgggactcaaatgcaatggatttatctcattgtgtttacctkgtgtggggagtatttcattatctctatctctaagtagagatagcctaagagtaaatatttaataatctcatgtgaaactgttttttttttaaattttactcccatatttcttcctaagtacagaaaacttcttacagcattaggtgaactggatacttgttgaatgtaagtgtatgctgacaaatgtttgaacaaattatctgggcaaagaaaaccactttgggatctaattatttaacctatatcaatctcattcacactatctgttcaattatttatttttgaaggtaccataaatatgaccaatgtacatttcaaaagagtgatttatgctttaaggattgaactagtaatttcatacatttgcattgaattctaaaatacttacttttcttgaaaaacagtaaaaattggaatttggtccaaacatctcaaaaaaagtaataaaggaaaattatgggtcaaattgagaagrttcaaaggtaatatctgttccaagatatgtttagcatatgactgaagcacagtgtgaaatamtttatatgctaaatgctgagtggtattttgataattggttggaaggtcaataatataatttaaaattgttctaaataaaatgttaccttatttgagttagctagatgggccatcattccacttagaagaaatagtaaaagcatttatgtttttatcatatttgtgaaattgcttttctaaaaaagacttttcatctaaatatactattcagtatatataagattctatctaaagcaatctttaggatggaaaaagttgtctgaaatggttaataaaaggcattacctccctggtttcaggcatttttttctcattgactacctggacaggtaacatacgagctagtaacaaacattaaagctgtagaccacttacaggcacatacacacatggaaattcttgactttaagagagtttaaacagagatgacaataagccaaagtataactcttaaattgcctctcttttaaattgtctctccagagttttcaaaatgactttaaagtgagtccctgctctcagccttaacattcatctgtggaagtatgtgagctcctgcagggagatcctagtgattgcatcttggcatctatgtaattatatttttaactatcctttgattacctgccaggcagatatttacaagggagtgtaaaaaagttggtgggaaagtatgtgatccttttatcctatttcatacatttacaaattgaaaaaatctcaaatgagatgattaaattttgtgaggaaaatgacattgaataatgttagttttattttttaaaaagagtttaaaatttgacacattttccccatagattttcctagctttctgtgagatatgtagaatagtacatgatttaacatctcagcatgacaaatcatactccctttaacaaatgttcaaacatactcatttcaggcaacatattaaaaagcaatttgaagaatgttttacaagatttctaataattcaaagttaaagattgtgagactaacatcaaaataattttataacaagtaatattatattacatattgctctatttctaagtgaagtttctctcataataaacaaacatctataaaaacataatggtctgggttcagtggctcactcttataatcccagaattttggaagactgaggcaggaggaaggcttgagcccaggagtttgacaccagcctgggcawcatagggagaccctttccctataaaataaagataaaacaattagctgggtatggtggcaggtgcctgtggtcccagctacttgggaggctgaggtgggaggatcacctgagcctagaatgtcaaggctacagtgagccatgattgtaccactgtgctccagcagcctgggtgacagagacagagagagagagagagagagaccctgtctcaaaataaaataaaaaaaagagagggtaaaagtgcttagtaaatttctatatctattgaaagaaagtatcaagatataaacagatatactaggaaatactactgattttcctgtcatcattcagatattctgcttatcagaaacttcatgtcattttaaaagttatttttatgaaaaagcaaatagaaaattacagtcagttctgagaagaacaccctgtaaactaaataagccttgaaatgacaaaaagcctctgataatgattcttgctatttattatacgtaggtgctgtagaaatctttgcatattgctatgggcttccaagaaaaactacctcgaaggaaaacaaagacaagatgacgatcattctaatgagaagaattataatatgacatgcacactctttacaaaggtaaacttaattctccttggtgttaaagagtgtgtaagttcagtcccataagactatatggagcaaaactaatttaggcacaaacaaatcctcactatgttatttatgacttatgcacatatttgaacttaataaccctttaaataaattacagttttaaaatctcagtttgaaaattttaactactctaagagttttacgtgacatagttgttagatgtccttaattaccatttaaatgacatgaaacctttcgtaataagacttcccaggaaatcctgacatacatgctacctactgaaagtaattttaaaaagtattaagtttatagcagcttagaagtaataagaagaataactttttataaatctgtttcactcacagaatagctagctagcaatatagaataaatcccccaacagcaaatggctttttaactacttcttttagrtttcatttcttaaaaacattaatttgctcctgattatttctatacatttccatttccacaagatgtaaaagtttttaacatttccagagacatctgaggaaaacaaaaatctaagtaatatatacaaaaagaatccacttggtataaaaatatatgctttagttaagtttctctggtttgtttcagtatcaggttaatatagaagaaattactaccttttgatttttttccygcttcatgttctggctttgcccctctaagttccaagagtatatttcttgacaaaactggaattatccattcctgtctgtcagaagttccatcaaagatatttatttgccactggtgttattctttaaagaacacagaattcaaggaacaatggaatagctgaaggtactgttcttaagyatgatatagtcagaaatctaaggctgtagttatttgacagtatttaattctaattttctcacactttacaaaagttacaaagaaacaggattttaaagttaccaacctttcaatgggtgtagctttcagatggttcaatgcaacagagagcacaatgagaaatacttgcagcttcaggatgcccattgcttctcaaattttctgcaaagaataatccagcactgaaatcaagagatttcttacagttctaattgaygtaattttaaattagagcttagtttttaaaagaaacatctttttaaaacgtaatttacaaggatcaaaattkttattgatacagtcccttaatattgtccacttttcaagtaatttcgagatttttactttcccaatttccttctctaagcaatctgaacatttatattgtaatacattctccctttagcctttctttgaaataaaccatgaatttaacaccaagtgtgcrtttctctaaataaataaaactttcccagaaataggaaattctttaccttttaatgtttcaatgtcagcaatatcagcaaatgcttctgatagaaagaaagcttcaagaaaagagtccaagcttgtatccactggaatatttaccccctcatttgctaactagtaatccagctcttatatacccctcacacctttctcagctctgacatcaggcagctcagagagcctctgtcattaatttccatccctatagatagaaagtacctcacaggcagcagaagyggatgggtcattattacattaactcatcagtaaatattaacgtagcaaatacacagtgtccttgtgcagttaatggtgtgtcatacacagcagaagtktgaatttgccatctttgtaagacatgagtgaatttccaagaattaagtgtatgttatggtaaggaactgatagaaaagggtaaggataacaacaaatgtgcatatatgcaaacagagaaatcacagacttttggtatatctaaacccaagtgacctcaatggctgaatcccatgaagcttcaggaataaatggagatataagggaaaggtgtataaaaagggcataaaagagaaatcaaaagtcatttacaatgaggtgaggggagatttaaaagcataagagtaatggaagacctactctgtggtagggattattctaggtaccagagatatgacagggaacaaaacaaaattagaatgaacaaatgctacataaccaaatgaataaaaaaattcatttttcagcacttagatagagatccataggtatatgtagtcaagtagtttttggatgaccttttccattcattcttacacagaaattttacaattattttgaaagaacagatttgtttcccattagctccatgagaacattatgaatggcttagctcacacagtactttgtagtttgtcttttaaaatgatttgctttttaaaattttctccaaattgctttttctttttcttgtatttctttctctctttctttttttttctttttttttgagatgaagtttcactctttgttgcccaggctggagtacaagggtgcgatctcggctcactgtaacctgtgcctcccgggttcaagtgattctcctgcctcagcctacagagtagctgggattacaggcatgcatcaccatgtatggctaattttgtatttttagtggagacggggattctctatgttggtcaggctggtctcgaactcccaacctcaggtgatccgcccacttctgcctcccaaagtgctgggattacaggcgtcagccaccgcacccatcctctttttttgtatttctaaattatatttggtatcttagttattaatagaacaacttagtgtcatgtaaagcaaataaatttcaattgtcagtgaaaatgtgcatgcctgtgtaatcttaaaaaaattgaagttctctaactagaaacattagttcattgatttcatatacttcttaaaagctttgtaacattgtttgaaggtgtttggtagagatttcaggaggaaagaaacttgtttagaatccttgttctaattattcaatgattctacaattttaatatttctgtgaaatttactgatattccaaaagaaaaaaaatcaaaagaaatggaaggataatgcatttccgtaagaagataatgtacttaacaaggtgaatatgaggtaggaggcaggactagactccagaggcagggcttgaacaccagaccaaattgagaactagctaaaacagggccaatggaaagcagctttccataagacacgccccctagtgtgccatgtcagtttaccattgctataacaacacccaggagttactgcctctttccagggcaatgaccagatgacccaaaarttactaccacttcccttgaaatttccgcataaaccatcccttaatctgcatgtagttaaaagtgggtataaatatgactgcaaaaccgccgtaagctgctactctctgcatatgggttagccctgccctgcaggagcagtcacagagttataaatgccagagctgtaacaccgcctcttcaataaagctgttttcttctacctccaacttgcccctgaactctttcatgaacaaagccaagaacccttgagggctaagccccagtttgggtctcacctgttctgcgttaaatacagtgatgtagaaagcataccagggccagtgacattaaataaagttcaacatcaaacatctagttaatgctgaatcctggaccaaagcttagctttatgactcatggtctagtgttcatttagacaaaaatacttgcttattacctacattgttatttrttctattttcataaccttttttgtttctctaagatgttaagggtgccaaacataacattcaaaatggatcctctcttaccctaatgttataaggaaaatcttctrtcgaaacactgcacgttctcactcataggtgggaattgaacaatgagaacacatggacacaggaaggggaacatcacacaccagggcctgttgtggggtcgggggaggggggagggatagcattaggagatatacctaatgttaaatgacgagttgatgggtgcagcacaccaacatggcacatgtatatatatgtaacaaacctgcacgttatgcacatgtaccctaaaacttaaagtataataaaaaaaaaagaaaaggaagacctggtattttataaggactatcatatgtcaggcacagtcataaaattgatatgcgatatcccacttcatctttgcacctcttcggtggttattatttgccctaatttatagataatgaaaatgagattcaaagaatataagtgacttgcttaaggttacagagctactcaggagcagaatgaaagacaaattcttatctgtctgatccaggatatttgtttttttgttaaaaatgatctatattttcatattctaaattgctaattgctttctctaagttgtatatcttgttacaacaccttgaatgattttgttatagccagatgtgaccttatgctggtctgtctcgtataatgtttagtaaaatcaacatctatcccaatctcaaatagcttcagagtttacatgctccctgtagcactaatgaaagtgaaggtatgtggatatttagattatctttacaagggcataatctcctttctaaaggacaagcatcactgtcacttatcttggtatcccctctagccttgctaagtcaaagtgtgaatgaggtgctggcagcttttgcatcacctgggagcttattagaaatgcagaatctcaggccccaccttggatccactctatcaaaatctgcatttcaaaaatgatctttccttagcaattgcatacacactacagttggagaaaaactgtcccrcaactttaaaacatcagtctggatgtggaataatatgtgatatctcacttcatcttcacacctctacggtggttatcatctgctctaatttatagatagtgaaactgagattcaaagaacataagtgacttgcttaaggtgaaagagctattaagtgcagagtgaaagacaaattctcatctgcctgtcccaggatatttgtggaatgaattagagggtggcaagagtaaaaacaggaaatctattagcagacgatgtcagtgagatcatgaggccttagaccagggtggttgctgaggagttagagaagtaaatgactccaagtcatattcataatcataacatgctttgacaatgacatgaataaagggaagaaatgagaagagattgaagataaacatgagtgtcaggatataattcataatatgtattaatcttcttcctatcacattttaaaagtaaaagatgttttatatatcattttaaaaataatttttacattttatcaaatttgtatgtgttcaaatggtattagaagactaataataaacacagtagttccttgccttaattctgcccacccataaattttgctctccacacagttttaactattttaggtgtttctacatttctttattttagctgtttctacatttcaaaaatatttacttctctggacactcttgatttattaaatttacattttatatgttgatatcccatattagaagaagaagattcagctctcctcacttttcttctctatcactatcgtaaaatagtttaataaattttttgaattatatcaatattaggtgtacatcttttttctatttacattttaaagtgtttcttttgggaactttcaaatgtatataaaattagaacaattatcaacaaatgatctatcttgctcactctatattcctacctactttcctcccacctcccactgtattatttaaaacaaatcctagagatcacataattttaactgtacattttttagtgctataaaagataaggacattttatagaacatagctctgaaaccattatcccatctaaacatacaatttatgggaattccttaatataaatattcattcagcattcacgttttccagttgtctacaaaaaaaaaatttaactggtttgttggattcaggatctaaacaagattgcatttggttgctctgtgtgactckttaatttacaattttctgtccgttatttttcacattactgatatttaaaaaatgggggcatttgttgtgtagaatttcccacatcctggattttgctgatggcatacgtgtggtatcatttaacacgttcctttctcatttgcatttcctctatacttgtagtttggtctagaggcttgatatgattcggcttccattattttggtaagaatatgtctcacgtgatgctgtttatttcctattgcattatatcaaggggtacataatatcttttatgaggttaaaaatgatcagtgggttcagatagcaggcaagttgttcattctgagttctctatcagcctttcatttactggttttagcaatctttgctgataattgcctgaaatcctttttattaggggttgaaaaatagtgctagtctaattctgtcattcatttgtcatttattagttgaaattcttcaatgaaagagaacatctcttgttaactatttgattaccttgaggtagttttaaatgaaaggcaagatatatgatttttctttttcatttttttgaaatatactttatatgtattttgatttcctttgtctttttcatattaaaattatcccatgttggatcaacaggaatcccttccagttgccttctatgtcttgtagtctcggtactttgatagctttattaatttctgatgaatggcgtgattttataacaacctaaatgctgattactattgaactgagtaatatgctgtgagtattttccttttttatttaaccttttgtttttcttctaattaacatttgcctctttttcgattgttcagttttaggcttgcaaattgtctcagagaatgataaaatatgatatgaccactcttcatatgataatatttccttcttatttccaacttcccctctcactgcccattctcatggaaatctttctcctatagcctctgaccttctgcttttctccaaactgaytgctttctaggattgctacgtagttgtttttatccttttgctttcatattgagaaatactcccatcattcttccattttaaaaatactgttctagttttcttgatttaygtccttattttgatggaacatatactgcagtagcttcctgagaatggacacatgaamgactgagaccttttgtttctgagcatagttctaaacacattatttttattcagaattataaaggcattatttcattgtattctaaccrctaatgtggctaaaagaaaagcagtttttgattttttatatttcattgtttaaaacctctctgtagaagtccttaggatcttttctgtattcctgatatatttaaattcaggctgatatgctttggtgtggatctttttctattgactgagctggaaactcagtgtatcttttaatatataaatttgtgttatttagttctgaaaagtacttttgaattttttcttgatatttgtctcctctccattttctctgctttcctctcccaaaacgcttttattaatcttgtgtttatatatattttcactatttttaatctctttaattatttaacttctatgaartttcctaatctaccaacttttccataaaaaaacaacttctacaatcatatttttaattttcaagagatcktgctttctgaatcttcttttatagcatcctgcttttgtttcattgatgtaatatccatcsttatctctgaggatgctatttacagctttctcttttctggtttcttttcaaaattctccttctgttgtggtcttcatttccttcagatcccttttgttaaaaaatatcttttaatgtttatatttcttttttatttttattttattattttacttaaggttctaggktacatgtgcacaatgtgcaggtttgttacataggaatacgtgcgccatgttgktgtgctgcaccygtcaactcgtcatttacattaggtatatctcctaatgctatccctcccccgcccaccccccggcaggcccgtgtgtgtgatgttccccaccctgtgtccctgtgttctcattgttcaattctcacctatgagtgagaacatgtggtgtttggttttttgtccttgtgatactttgctcagaatgatggtttccagcttcctccatgtctctataaaggatatgaactcatccttttttatggctgcataatgttccatggtgtatatgtgccacattttcttaatccagtctatcactgatggacatttgggttggttccaagtctttgctgttgtgaatagtgctgcaataaacatacgtatgcatgtgtctttatagcagcatgatttatactcctttgggtatatgcccagtaatgggatggctgggtcaaatggtatttctagttcaagatacttgaggaattgccccactgtcttccacaatggttgaactactttacagtcccaccaacagtgtaaaagtgttcctatttctccacatcctctccagcacctgttgtttmctgactttttaatgattgccagtctaactggcatgagatggtatctcattgtggttttgatktgcatttctctgatggccagtgatgatgagcattttttcatgtgtctgttggctgcataaatgtcttcttttgagaagtgtctgttcatatccttcacccactttttaatggggttgtttgttttttttcttgtaaatttgtttaagttctttgtagattctggatattagccctttgtcagatgggtagattgtaaaaattttctcccattctgtaggttgcctgttcactctgatggtagtttcttttgatgtgcagaagctctttagttcaattagttcccatttgtcaattttggcttttgttgccattgcttttggtgttttagtcataaagtccttgccaatgcctatgtcctgaatggtatggcctaggttttcttctagggtttttatggttttaggtataacatttaagtctttaatcccacttgaactgatttttgtataaggtgtaaggaagggatccagtttcagctttctacatatggctagccagttttcccagcaccrtttattaaatagggaatcctttccccatttcttgtttttgtcaggtttgtcaaagatcagatggttgtagatgtgtggtattatttctgagggctctattctgttccattggtctatatctctgttttggtaccagtaccatgctgttttggttactgtagccttgtagtatagtttgaagtcaggtagtgtgatgcctccagctttgttcttttggcttaggatcgtattggcaatgagagctcttttttggttccatatgaactttaaagtagttttttccaattctgtgaagaaagtcattggtagcttgatggggatggcattgaatctataaattacctcaggcagtatggccattttcacaacattgattcttcctatccacgagcatraaatgttcttccatttstttgtgtcctgttttattttgctgagcagtggtttgtagttctccttgaagaggtmcttcacatcccttgtaagttggattcctaggtattttattctctttgaagcaactgtgaatggagttcactcatgatttgtctctccgtttgtctgttattggtgtataggaatgcttgtgaattttgcacactgagtttgtatcctgagattttgctgaagttgcttatcagcttaaggagattttgggctgagatgttggggttttctaaatatacaatcatgtcctctgcaacaggracaatttgacttcctcttttcctaattgaataccctttatttctttctcttccctgattgccctggccagaacttccaacactmtgttgaataggagtggtgagagagggcatccctatcttgtgcccattttcaaagggaatgcttccagtttttgcccattcagtatgatattgsctgtgggtttgtcataaatagatcatattattttgagatacatmccatcaatacctagtttattgagagttttcagcatgaagagctgttaaattttgtcaaaggccttttcttcatctattgagataatcatgtggtttttgtctttggttctgtttatatgatggattatgtttattgatttgcatatgttgaaccagccttgcatcccagggatgaagccaacttgatcatggtggataagctttttgatgtgttgctggattcggtttgccagtattttattgaggatttttgcatcgatgttcatcagggatattggtctaaaattctctttttttgttgtgtytctgccaggctttggtatcaggatgatgctggcctcataaaatgactgagggaggattccctctttttctattgattggaatagtttcagaaggaatggtaccagctcctctttttacctctggtagaattcggctgtgaatccatctggtcctggactttttttggttggtaggctattaattattgcctcaatttcagaacctgttattggtctattcagggattcagcttcttcctggtttagtcttaggagggtgtataagtccaggaatttatccatttcttctagattttctagctgatttgcacagaggtgtttatagtattctctgatagtagtttgtatttctgtgggatcgatggtgatatcccctttatcattttttattgcttctgtttgacacttctctcttttcttctttattagtcttgctagcagtctatcaattttgttcatcttttccaaaaaccagctcctggcttaatttattttttgaagggtttttttgtgtctctatctacttcagttctgctctgatcttagttatttcttgccttctgctagcttttgaatgtgtttgctcttgcttctgtagttcttttaattgtgatgttagggtgtcaatttaagatctctcctgctttgtcttgtgggcatttagtgctataaatttccctctacatactgctttaaatgtgtcccagagattctggtatgttgtgtctttgttctcattcgtttcaaagaacatctttatttctgccttcatttcgttatgtacccagtagtcattcaggagcaggttgttcagtttccatgtagttgagcggttttgagtgagtttcttaatcctgagttctagtttgattgcactgtggtctgagagatagtttgttataatttctgttcttttacatttgctgaggagtgctttacttccaactatgtggtccattttggaataagtgtgatgtgttgctgagaagaatgtatattctgttgttttggggtggagrgttctgtagatgtctattaggtccgcttggtgcagagctgagttwaattcctggatatccttgttaactttctgtcttgttgatctgtctaatgttcacagtggggtgttaatgtctcccattattattgtgtgggagtctaagtctctttgtaggtctctaatgacttgctttatgaatctgggtgctcctgtattggatgcatatatatttaggatagttagctcttcttgttgaattgatcctgttaccattatgtaatggccttgtctcttttgatctttattggtttaaagtctgttttatcagagactaggattgcaaccctgcctttttttgttttccatttgcttggtagatcttcctccatccctttattttgagcctatgcgtgtctctgcgtgtgagatgggtctcctgaataccacacactgatgcgtcttgactctttatccaatttgccagtctgtgtcttctaattggagcatttagcccatttacatttaaggttaatattgttatgtgtgaattttatcccgtcattatgatgttagctggttattttgctcattagttgatgcagtttcctcctagtaccaatggtctttacaatttggcgtgtttttgcagtggctggtaccggttgttcctttccatgtttagtgcttccttaaggagctcttgtaagtcaggcatggtggtgacaaaatctctcagcatttgtttgtctgtaaagcattttatttctccatcacgtatgaagcttagtttgactgggtatgaaattctgggttgaaaattcttttctttaagaatgttgaatattggcccccactctctactggcttgtagagtttctgccgagagasccgctcactgttagtctaatgggcttccctttgtgggtaacctgacctttctctctggctgcccttaacattttttccttcatttcaactttggtgaatctgacaattatgtgtcttggagtttctcttctcraggagtatctttgtggcattctctgtattttctgaatttgaatgttggccttccccgctaggttggggaagttctccggcatgatatcctgaagagtgttttccaacttggttccattctccccgtcattttcaggtacaccaatcagacgtagatttggtcttttcacatagtcccatatttcttggaggctttgttcatttctttttactcttttttctctaaacttctcttctccctgcatttcattcatttgatcttcaatcactgataccctttcttctatttgatcaaatcrgctactgaagcttgtacatgcgtcacgtagtccttgtgccatgattttcagctccatcaggtcatttaaggacttctctacaytgtctwttctctacactgccattcgtctactcttttttcaaggtttttagcttctttgtgataggttcaaacatcctcctttagctcggagaagtttgttattaccaatcttctgaagccttcttctgtcaactcgtcaaagtcattctctgtccagctttgttccattactggcaaggagctctgttcctttggaggagaagaggtgcgctaatttttagaattttcagcttttctgctctggtttctccccatctttgtggttttatctacatttcgtctctgatgatggtgacctacagatggggttttggtgtggatgtcctttctgtttgttagttttccttctaacagtcaggaccctcaactgcaggtctgttggagtttgctggaggtccactccagaccctgtttgcctgggtatcaccagcrgaggctgaagaacagctaatattgcagaacagcagatgttgctgtctgatccttcctctgraagctttgtcttagaggggcatccccctgtatgaggtgtctgtcggcccctactgggaggtgcctcccagttaggctactcaggggtcagggacccacttgaggaggcagtctttcctttctcagatctcaaactccgtgctgggagaaccacaactctcttcaaagctgtcagacagggatgtttaagtctgcagaagtttctgctgccttttattcagctatgccctgcccctagaggtggagtctacagaggcaggcaggcctccttgagctgcggtgggctccaccgagttcaagttcctagctgctttgtttaccttctcaagcctcagcaatggcggacgcccctcccccagccttgctgctgccttgcagttccatctcagactgctgtgctagcagtgagcgagcctccgtgggtgtgggagcctccaagccagccgcgggatataatctcctggtgtgccatttgctaaggctgttggaaaagagcagtattagggtgggagtgtcccgattttccagstgctgtctgtcatggcttccctttgctaggaaagggaattcccccaccccttgtgcttcctkggtgaggcaatgccctgcccagctctgtgggctgcacccacttgtctggcaagccccagtgagatgaacctggtacctcagttggaaatgcagaaatcaccagtcttctgcgtccttcacactgggagctgcagactggagctgttcctattcggccatcttggtgccaccctctgatgtttatatttcttattggagctttctttaaatatctratgatccttattggcccatttatttatttttatattggtgtcrttttacaccttcatttagggattatcaaaattcaataaactgcacatatttaaaatgtataatttgactggttttggccaatgcacacactcctgaaaccatcaccacaatcaatgtaacagacatttccatccttctaaaatgttgtcttgtaaccttttttagtttatctcgttacacttcctcatttccttctactccccaacccactcctcaggtaactgctgctgtgtgttttgttcctatggatttgtttgcattttccagaattctatacagatgagatagtatagcatgtattcctttttgcctgactttttttttttacatagcataatgattttgaaatttatctgcattccgtatccatgtgcatattttaaattgtggagtagtgtttcattgtgtgaatatattacaaaatgtttagccattttgttaatggacttcgggttgtttctagtttgaggctattacaaataaagctgcaacaaatattcatgtacaagtctttgtgytgacacatgcttcttcttttctcttgtttaagtatgtaaggagaggtaagaagtccattgattttttttttttttttaagacggagtctcgctctgtcgcccaggctggagtgcagtggcacgatctcggctcactgcaagctctgcctcctgggttcaygccattctcctgcctcagcctcccgagtagctgggaccacaggtgcccaccaccatgcctggctaattagaagtccattgacatttattagtgagacactacaatgttgattgggtgttacatgcatggacatggcttgccaaatggtggatttcattgcaaggttattgggtaggaagaaggccatttatctgggagactcccaaatatcagtatttgtggttcttttagccaggcgatttcaggtttgtgttttttttttcactaatgttttacacaaggagtgaatagtcaagttgaggaagagggtttataatttagttgattttccctgtttttaaactagtgtttttcttcttccctttatggtgattggtttccacagacctagagtctatcamgtttaatttatccagaaattaaactgttgttagggttagagaaggttgttacctggatgcttggaaggaagtatgcggggatggtctttcttaaagtccatagtcttaaagtatataaaaatcttctagcttttagtcttatcccatggccttgcttctgagttttctggggtctaaaaatccctagacttgcagggacactggagtagcagcttgcttcctgttaacattgctgtcttagctaagcataggattctgaagataagtcattatctctcctcagtcttttgccaccttccaaatatatgtgaatatcttcagcctgttattgtttcctctctcatgtgttctttttatttatttgttttcattttaatattgccatggttaaatgaagtatagattacatgtttattccttcaggaatctctttgtggctttggtaggtatttagacttatgtattagaattcagtatttaatggtttgcatctttatattttaaaagtatctccaacaaaccgctttttatttttcttttaattttttcaatattgttcatttattgtttgtagacttcttttcatgtttcaaagttaatttttaattataaaaaattaaaaaggaactaaaaattgaaaagtattaactagtgataaaatataagacacaaaattatctatatatgatgatagaactatacacaatatttgcatacaataaaataaaacaaaaatattataatactttttgtgttagtactaagccatggatgacatttctctaggcatttttaatgttgctacatagttttaaaaccatctcgttagtggattgccacatagtttaaaagtagtattgctcgaaacattttttggagaggaaaaatatgtgttttaaaatctgtgctggttggtatcaaacaatactttttctatttcattccactaagaatgcttaaagaacactattttctatgtaaaaagctgcaaattagcaagcttaatgattttttccagcatactttcatctctttgtatcacagattcactttgcyagagaacaatctagagttgtcttttaaaaaattattctttctaccatcctttaaaatgtagcacagacatttttaagtttattaagtgaaaaatgcctattccaacactcttttcatatctccttttaccagattcaaaacatgtgagtaaagttttgaaaagagacaggagaccaactcactccaccctgccccacctcacgccacccacccaccaaagtctgagtaagagtgagcagtgccctctcacttagagcttaattttctttgtgtgcttttatggagaattcggtatttaatggtttgcatgtttatattttaaaaacttctcaataaattttcttaagcaagaacatgtgttttctaatactgttttcatattttaaaagaaaatgcattttttaaggactcctgagatcttgtttcagacatacagattaggagctttagaaaggcttgatgattcctccagataaaaacaaaaaaaataaacacagaaacaaatgaaaaataatcgctgagttagaagaaaccttaagaataatttaactctcccataatgcttgaattattcattcaataatacttagagcatctattggacgctaaatccttacatatagtccagttggagatttggtcaacaaatgggaaaataacaatgacatttccaaccagttgggacaaaaagtgctgcaacaccatgtggcttaaacaacagaaatttatagtttcacagttctggaggcaagaagtctaagattaggtgtcagcagggttggttctatctgagggctgttccatgcctctttctagcttctggtagtttgctggcaatcttgttkgtttggagaagcagcatcacctgatttttgtcttcattcccatgaggcattatccctgtgtgtgtgtctctgtgaccaaacttcccctttttatacgtccaccagttatattatactagggtctcaaagtatctcagtatgacttcatcttaacaattactttggaaataactctgtttacaaatgtggtttcattctgaggtactatttggacttcaacagatgcattttgcagggacacagttcaacccataaaggttttctggacattctatagtgtttgtttgtttttatcctttctttagctcagtagattttgttcgtaaatctttctcagtgaaattatttcttttactattttgtggtcaatattttctgtattattgctatttgagactttattatatttatatttgtaatctagtatataatctatttcagtaaagtttccacgagcactggaaaaggcatattttctgtttaagatacaaaagttctcactactctatagatctccatacaatctactttattaaaaatgtaayttaagtcttacaaatccttctttatactttttaccttactagaacttggactgcatgagaattaagctactattatttaaatgtttctgcctgtttgtctttgcatctcctgtgttttctgcttcatgaagttgttttactcattgggtgcatagaaatgtataacactcatatctttactgtgaattgttccctttagtatatttaaactacttttctatgtcacatttaatgctttttcaaaagctctgaatgttaccttttcaaatawgatcatgactcatttttttcttacctctctccttcctttttctctctccctttttttcttttgtatcccactgtgcccgttcttctattgttatctttaggtataaatttgtatttagtgtgtccctgtcatacacagcatataatagagatatgttttgggagttaatctgaaaagttctttcttttaggaggtaaattaagcctgcatatttcttaatatcataggtatgtttgggcttacttctgtcatattaataatgataattattccatagtgcttaatattaccagactttattcaagaattatatataaatattttaaatttaattcttacataaaccatcatttaaaaatatatggtgaaactgaggtacagagacggtagtaacatactcaaagtcacagcgctagttacttatagagctgtgattcaaatttattctgattcttgaatttttttctctatcactacattatacagggtctttatttgatgccttttgtgataatcctgtataatttcttaaaatctattttcaagttcacaaatcatccctttcatctgtatctgatatgctgttactcattcartactattttaatatcaaagattaagttagtttagttctaaatacttcttggccattttaagtagccttttttggttaattagaaataatcagttttaaaatcttttaaccattttatatatggttggtttatactgtgtatctgataatttcagcatacaaattttcttttaaacttaatctgtattttgtttctgagaactctcagttacagtagtttgatttttgtttataagatcatctgttttttaacttaatctgtaagaatcctaagtgtttatgttggaaatattccctgagaaargatttggttgcattgccactrtacagaattccctaacatctaggatcactttagctccatgggggattaagggtaatataggaaactcacatcagctccctaaccttgagacagactcaaagtttaggtctcccagatcctaggccttgtatcagtattttctcccagaacaacttcctgtcacttattgattactcatggctctctgctcagattttagctcattgcctaccccctcacacttcgagatttcttttcctttctgtgagcttagccataaaaatatgtttgtcttaacttatctaagttctagttgtcttttagtgggaggactcttcaggataaagycatacttcaggaaatagtgatgtgtatgcacattttaaagacttctgagctrtatagacaaattctactctataaaggtcgtaataatccatactcctctagaaatgatttagtggctctggtcttcttaaaattgccaacacgggaaattataataaaataatatacatggatcatatgataaagaaaagtagtatctttgtatctttgtgttaagttgatttttttatagtagtgatttagtgtatttttgaacatatgtgccatttactttctagttacctggaaatgtagatgtagatattaggataggtctgacctggagatgtgcaaagctttgcccatagagtatataatccaaggagtgcatgtgcaacaacagtaaattaagacaaagagtatcccaggaaacatcagaattcatgagtcatactgagaagtaggagccaaagaaagatatggaagtgctcaaagatgacttattgggagatatgagtagtgtcagcaatcaaatgaagaaaaaattcraagaaagaaaggttgttatgagtgttacatgataaagataaataacataggatgaaggctaaaaaacagaaatttgaatttaaaagtaaaagtttccctacgaccatagctacactgctttcaggtaaggacagaaacagatacaatggaatagcaggacagtcctgaacaactactaatatagattcaatgtatcataacatattgagagtcagggatcttttgagactatgacggaaaaaattgatttttttttctggaaaatgctcacatgcacacacaatctaaatattgaatgcaatatctagatattcacatttcctctgacaactatctttatctggctttacttattgtcacctaatttaagaagtttcatcacagcagaaaggagaaataccaataccttcaggagaggataggggtaggttaaggtaacatgtaaaaaaatacctggcttttactaaacacatgttcattgaatgcttgttgatttttcagtagccaccaggaaagaagaggaaaaatataattgtcggcacagtgtccgcagaggactgagaggtactgggatcatgagtgtagtggagacattagtgttttagggaggagggacgtggactttggraatatcagtttattcagaatctgttttatgtcatgaattgtgttagaacattcttatgcaatgtctcccataatcttcaaacaaccctaatgttaccttttacagtgagcatttgagtgtttagagaggttaagtaactttttcaaattcatgttcgaaagtggtaagcaggagaatctaacctccatttgtcacacaccaaagctgccacactgctgggagagttataaagaagttaaaaaattacttactgtaagaaatattgaagttctagggaaggtaaattagggaaatttaagtttcaattttcactggcaaatagctgtgaatgaccacttgagaatagccattagcctggctttctcctctctactgacttgtcagcaatgtccctttcatcacctgaagcagtatccacacagatctgcaactgcttggccctgctgcctggtccctttcatgctgacagcattggaaacagggattggaccaagcttctgggaaaaaaaccaagttgtccacaggagattttcacatgtgagctaaaccaaaagggagaacaaacgggatataatcaggtgcatcacagcaatctgctatctcctaccaaagccactgagctttgcctttttgtttcttttcttttctttctttcttttttttttttctgagcaccatcccaaaaataaagaaagaggctacgaaccttccatatagtagaagtcttaggattaagcattttttccctctatgcaatattactgttcatgttggttcagaagatctttagctctttgaaactctgtttttatatattttgttttgctccatatttaggaacattttaaaaatactattactttctgttgtttatgtttgaattgtattgcaatttgatctcctgctaagtaacttccaacttaagtagatatgataaaattaacaggctccaaatatttatttctcttagttataaattcttggtaatgaatactgtgtttgattaaaattataataggggttttaagcagtaatgtgtatagtcaaaggaattctgattcgaatttgaatgtttaaacagaccttataattatttaagggggaatattctgttattttgttgtagcactgctcagagaggtagcatataattaaagttgaaatctaactattttataaccactgttcgaaagtttaataacttgtgccaaaagtgtctttgaagatcagtggtttcactttaaatgtaaattgagtgggacaaactggccaagcttactgagatatttttgcatacaccttatgtacttcccccarttcctacaagaacaatcaaccaaacaatgaactaaacaaacatgtaaagcaacaaggaaaaaacattttttagtttaatgtttcagcataaatggattgaagatatttctcgcattatgcttttggctgtggatggaagagccaacacttgtgtattctgaacaaatattttgagtttcagaggcccagagcaacaaagttttgtctataaacaacagatgacaggtattaattaataaagagtgtgttcatatgtaggcagccttgacggactcttgattcatggctggtattttcagacacaaccacacatagctgtagtagcactattaataggaagattcaaataaatgttcaattagaggattcctcgatcagatgatcttattgaaatcaggtgaagggaggaactatggtaataagccagttactgcaaaaatrgaatgagattaattgagattttacagacactatgacattggagttgtaagactaaagccctatagggcttttaatggctcaaacctcatagaattttgtctaactgctgccgtccacctgtcctagtttttcctctcttcgcatttccagagatcagttcagtttaggggatgttggtctgtagtgaaatgcttggtgagatccaattctaacctttcaacctatgaaataaaatagtagaccttttgagtgagtatgggggtgatgcaattgggtgtttgatattttccatgagagtatgagaccctggaggcatcttgaattcctttcaatctgtccttcagattttattccgagatttcgtttatgccacacactgttaaccttctttgaaattcaggaaaagtcctcctaagggcaatttcaaagtcaatctaaactgggacccaaaggattaggggatgttggtgagcttgtgtagtatttatctgacctcagatatttagaaacgtaacaaagcctggtcttggcacactgtatattcccttcaataatggtctattcctaaactttcatttttatttttatgattttttttttttttgagacggaattttgctcttgttgcccaggctggagtgcaatggcgtgatctcggctcactgcaacctctgcctcctgggttcaagagattctcctgcctcagcctcctgagtcactgggattacaggcgcccaccaccatgcccggctaattttttgtattttttagtagagatggagtttcaccattttggccaggcttgtctcgaactcctgacctcaggtgatccacccgccttggcctcccaaagtgttgggattacaggcacaagccactgcgcctgtcctaaaattttactagtagtatttataagtattataaggcatctaaaaaaaatgcaaggcaccaaatgtatgatgctcctggaggtaatttgaactttcttgagctgcatggagatttttctttaacaggtctgtttaggaatatgttgcaggtggactatagaccacacttggagaaactgcactagtaaaacaggacaactgacttgttttttattccaagcaaacattgaactttgtgacctccatgcttgtacctctcaggttacaaaacacattttgccatgtcacgtatttgtctatatttcttatctattggcttccaagctgctaacttcttatttactcagtgcctccccatrgtgccttgtacacatttaggcaccatgttattacagtgtgatggttaagagccagggctttagagactgacaaactgggttggaatacaggctgtgttgttgctgtgagcaaattaatatatctgaatctctagttcctcatttataacactaagtaacaagagattttaagttacgcagtatatgcttattaaaaaaacccagaaatatatgtaagaaaactattaaaataaaaatcaatctaatttcacctcccagagaaacatgactttttttttttttttttttttttttttttkgagacagagtcttgctctgtcaccaggctggagtacagtggcaccatctcggctcactacaacccctgcctcctgggttcaagtgattcccctgcctcggccttctgagtagctgggactacaggtgcgtgccaccacgcccggctaattttttttgtattttagtagagacggggtttcaccatgttggccaggatggtctcgatcttctgacctcrtgatccacccgcctcggcctcccaaagtgctgggattacaggcgtgagccactgtgccyggcctgaaacattactttttaatttatatttatttgcatgtcaatttaaagtaatgtgccattcagatcatttttgtgtgtgcctttttttaaagaacatgctatgaatacttttccatattaataatgttttaccttgtaactttaaataaccatattttattcttattgtatttgtataaaataattccataatattggacatttaattttttctctctttttttttgtactttactaaaacaaagctgtggtgaatattcctttgtacaatctcttgtcaatttttttcttgttattctaaaaagaataacttaagactttatagtcttaagactatatacataagtcttaagactatatacatttttaaagattttatgcttactacttaattgccattgaaatatttatactttcatcatcagtgartgaaagatctctaccaatgttacctatcataataaagaacactttgacaatttgataattggaaaacggcaactaatttgtatttcaaaatttatttttaattcagcaaatactaatatgcatctcctctgttccagtcactgaatgttgggaaggggaagtgattgagaggtgagcaaggcagatcaagtttctactttgatggaacttaaagtctaacaactttaaacaagtagcaattaaaggggtgatgataaggagcatttaaggttatgttccaggttcagggtgttagattaagcctcctaaagtggcacttacagatgaattgaagttagccaaggtgggaaaggagggcaatgcagggaggcacagaagtaaaatctttctggactggccgatgctggagaaacagaagaaaacagtttggttagtgcgtggagtataacagaatgattcaaaatgaagtttgagaggtagttaggggtcagatcccataaggccttggaaggtatgttaagattgaggacttcattttgagggttagatgtttcattttaagaagataattctgattgaagtttgagaattgagtacaagagagcaaggatacgtatggggagcccagatggaaggcaacagtgtggcccacaacggcttgcagtgtatgttattcagaactccttggttgcaagtgatagaaatttaactcaagccagcttgaggaaaatggagaatttgttgattcttataaccaaaacatgaaaagtagaagtttcatcwgggcctctcagcagaatagaaacccaggactccaatgctcttaagagtctctatctttccccctccccaactttcctgttctcttctcttattcatcttttttctatccttctctttatatctcaagctaattatctcagactgacttcctccacatggctgaaaacaaggccagaggtgactcttgtaatacaaatattattgcctcaccatctggaaagggacagatcttctctcctccccttttaaaaaatagatcttaatttttacaggaattttaggtttacatcaaatagactggagtacacagatttcccatatgcctcctacccccacagctgtatatactcctccattaacatactctaccagagtagtacatttgttgtgactggtgaacccacactgacccatcattaccacccgaaggccgtagtttacataagttgttcattttggtgttgtatagtctgtgggtttggacaaatgtataatgacatgtgcccgctattgtattattcagagtagctgcactgccctaaaaatcccctgtgctccatggaagatagtatgactattaataacaaatggctgaattgaatagatattaaatttaaatgataaagatgtcttctgsctttgattccttgtggttgataaatggctcaaagtgcaatggaaaatgagggtgaggatgatacagaatgtggtgttatagaagccaagggaagagaaccctttttaaaaaagggagtaaaaaaagaatgagatccagtcatttgcaacatgaatggaactgaagattattatgttaagtgaaataagcctgtcacagaatggcaaacatcacatattcttccacttatttgtgggatctaaaaatcgaaacagtagaactcatggacatagatagtagaaggatggttaccagaggctgttaagtgtcatggggggctgtgagggagaggtgaggatggttaatggttacaaaaatagacagaatgaataagatccactatttgatagtacaacagggtgactatagtcaaaaatgacttaaccatacattttaaaataacttaaagagtgtaactggatggtttgcaactcaatggttaaatgcttgaggggatggataccccattcttcatgatgtgcttattttaggttacatgcctgtaccccttctcatgtaccccataaacatatacctactatgtactcacaaaaatgttttaaaaaagggaatggtccttattgtccactattgctaaaatatggaaaaagagaaagactaaaaggtggatgttgaatttagcaacactaaagttcattggacttcctgatgaagaaagcatagcacaatggtttggctggaagtcacaggggttgagtaatgagatgaagaattaaagatggcaattacaggcatttctattaaaagttctttgaagtttattattttaaaatacattaattggtttgctatttattctttgtaaatctgtttctattttttgtccatatttccattggtggtatcttttactttttgacatataagtgctatttatataatgctattaaatttgttctatatgattcagttttccccagcttccctcttccttccttttttccttcttccttccttccttccttccttccttcctttctttctttcttctttccttctttccagagttggaattgctctttcacccaggctgcagtgcagtggcacgatatccgctcactgcaacctccgcctcctgggttcaagaaattctcctgtctcagcctctgagtagctgggattacagacgtgcgccaccatgcctggctaatttttgtatttttagtagagagggggtttcaccatgttggctaggctggtcttgaactcctgacctcaggtgatccaccccctttggcgtcccaaagtgctgggattacaggcataagccaccgcacctggcccccagattcttaatttactattaatagactttattttcttggttgttgtttctctaaattttaactttttgatataggcattctgcctctggttttgtgtttagaaaggcttataaataggcctccatcatagcctataaatagttacaacatttttgtccagaacttttttggaatttcctttggggtatggaaggaagtagaaatttaattttttttctaattttttctcagcaagttttctttaaagttgtttcactttaaacaataagtttctttttaattcaacttatcaaaagaatgactcctctgtatgttaaaacacacttcatcttacaaaacaatgcagtcttgacagatgggctataaatagtggctttttttttttttggatgtttgaaacaaatccgaacatagactcagtcatgttactaagagctttcacaaggagtgaaggaaatgttcttctttatgtaggtggattttcattggaaattactgttaaatacaaatgagcctactattaatggcaccaatggtgtatgtatggcttgtaattcatcttgtttccaaatgaagtacatgggaagtgtgagtgttacttttatgggggagtagagcagacagtctcagttatgtctgcaaattcaagatatgtagtatctgatgatgttggaggttgggtcacacaacatgtcaaactccaatcaaaggaaaattacttgggaatctgtaacttggtacttatcattgctgggaaggtggctatgccaggggcttttgctgaagcaagaacaaaagtcattttcctagtcattgttccacatatgttttttttttttgctaacatatcttctaaaaataaagtcacatagttcacaattatggcttgatttgaactgtacacgctaccaatggacatttttctgaacacaaaaatccatcatggatctgtatcccgtgctcagtaaaaatatatccgtgtttgctcttcagcacagctctctcaccgacagttctgcagaagtgggtgagttcttcgaagatcaagacactgaaagccacctctggaatagtgaattaagtaaatttactagtttaccaagaatattgttttacggattaatctgcataatcatattgagtgattttgtatatggcttctcttaaacatacgttatttactatattaaatgagtatggtttttttcttgaatatatttaataatctactgaagaacatattcagcatgaatatattcttcataaatgcattcttcctaattgtagtgtttagagtatatttttcacatataagaatatattcattaatttattcttcttgattatgtttgtagaactgctttattggaacatgctctttattaacatatttatactcgactatattaagatatatacatgttatatattctatatatttgttaacaatattcacaaaaaagcaataagcctaggatccagcttctggcaaactgaacattatttaaaatgtatttaatgagaatgtgtatatttaaaaataatatttcttatactaaattttagtaaatttgcaaatttggtgaatttggcaagtttgtcacttggtgaattgatgctgttactgacctcgggtttaattctgttatcaatttacttacttaagaaagcataatttgtgattgtttttcaagacttaaaatggaaaaaatacatttttgtttcatagctttcattcagccgtttcaacttggcttctatgatgatgtaataaaaaccaatttaaaatcaattataattttcaacaagatactgtaawcctattcctagaactgataatgatttgattttttaggattagttatttatctaagatgaatgagcagagttactgtctttgcccaaaggaaaaacaaaagatgtaaccctgcatgccaacgaacccatcactctttctctggttctaacattttagaatagcctggaccattcttagttcaagactactttgcttacatcataagaattgagtcacagatttataatgatttactgtttctactgcaaggagaaagcagattccatctgaacatgctactttcacatgtatttagcccttattttctgagatttacagaagaatgaactgaatttgcaccataaacgtcagaagtgtaaaaaaaatctgcaattttacttagcaaaaccaagcaggaaacaaaaagagatcaaaatcaaaacaaagccctccaatgcttgaagattaaaaattaaccagcttcttttattgtgttattatggcttttagtatttttatgataacgaaaagtaacatttacccaccctttcttatggagtttatatgaataaactccttgggtttatataaatatggaataggarattttggggaaagaacctttattattaacagtgattttatcaagaaaaggtagaagcaatattgcaattagttatttaagaaatagggctaggatttactaacatttgagttcaatgtaaagaaaaaaacccattctaaatctaaaatcccaaactgttaccttttctttttttaaaatctcatttgtctgtaacttgatgaatcaaatgcattgttaacattgaatagagcaggactttaattcatatgtttcctttatcttgtctttctcttatgcatataattttctgctgcattcattcagataagaaattcacagcattatatgaagagtcctaaaacgtctcccagactacatatatgtgcctctttggcttcaagtgtgctaaaatttctaacatgtgagccagtctccttaattaaaaaactaacaaaaggcccctattaaaatatatatctaactgggaggggcatatcaaattcaaaagtaagaaggggtaatttattgttatgaatttattaattggattagctttctggcaactagaatagaaccaaggtatggaacactatggaaagtgagtcaggtgaactactgtaacttaggcctccatgaagccgagtatcagaaacataggtttctggtatgatggattaaggagagagggctcttccttggattatattgtctctcagcttcttattatgctaaaattttatgattctgtcattgtagaagttcccgaaaggcaggaaatatagttttttaatagatacaactgatagctcataaagttgcttaatgtacctgtaacatcaatgctacatgcaaatggtcactcagtaaacaagatttatctaatttttgaagattcatgaattcacttatgaaagttcaagtttttaccgctcatcagtaattttatcatatttaaaggacactatttatcaggcaaaaggaatatgttggacccatatgattcctttgcttttcttcagccattaataggcattcttcatactttctgcataacaactggtcttgagggtagacacagtaagtgtccatctagtgggtgtgatttgaaaggtattgcaaaattttgttctgctctgccctatttccattccaatgcaaatgtccattattaacattttccctttgcatgaggtaagctaggggagagtcttctcctgtgttttataaacatacatatttttttttctggaaaggaggatgaggattagttatcccttaatcagaatgttctttggttagctgatgtcatgctgaaaagtagcaaaatgaggtactcaagggatatctaagataagaaatagatgttcacaaatcctgcaataagcaatttgtggtgataaggcaaacattcaatcttgatgaatggaagacaactacctactaagaacagcccacttgcatttaaccttgaagttgtcttagaaagctgtaagaagttacacttgagaagcaagaaagaaggtcctgcaagaaaaaaggggccaattttgtacatgaagagccagatgaatataagcaataagaacaaacatttattgatcacctactgcgtacaagaccttgccatgagtgctatatgtgaagagatattaagtctcatttgtaattagttctcagcacaagtagaaatgatcataggactgggaatatttagttctgaaaatgttctaaggagatgtcagagaaaatgggcaaccatgtctccatggcccaagaaaatatgaacctaatggcatgacaagtttgtatctacagagtcccaaagcaacaggtcaattaagtaagtctctctccctgcctttccacatctggtgccacagtcctctgctaaactgaagattccaaaatgtgtaactctagccttttgcctgagcttcagactcatgtcctactgcccacaggacatacccacctggatgtgacgcacaggtcatgtcagcrtaagtatgagcgtatgttcatgttgaaattgagtgtacttttccccctagagctgctctctgtcctaattttttatcgcaagtactggtactatcaagctagaaacctaggaatcatctttgatacttcctcctcctctttcatcccatatattcagtaatcacyaaagatgttagttacaaatattaattaattctcaaaaaaggttttattttttatgaatagatgattctatctaaaatgtttaattttagatcgatatgcttgtagataattataaaatttacttatttattacatttggtaatattaaacatgaagacaatattctttgtcttatatatcgtgctatttaatttgtgacatayaccccttatgttaaattaatgttgagagaaaaagcgtggcctgttaagaaataaatttatagatgacattatgtcatatttgtagattggagtttactatatgttttaatttgttaaaataagaggaagctgattttttatgtttggaatttttatacttaaaatattttaaaagtgtaatatattaatacacttgtttaataatgttggagtttaaaatggaagaaataagagtaggttttgtataagcatatttctctaaatatgaaaagcctgcttatgtaaaattctccatcctattactcttttttcaaaaataggtcttgaagcagtggaaaaataacatgaggtagtaggtaaatattttgaataggtgaatgaaatttactgatcagatgaaggcaatcttgagagaaatgtataacattatcattttatgctcctcattaggttatattttgagaccagtgctctttatgcttcctgcctttagccatggtccattagaggtagaaataaaacagcatataaccacaaatatagatcatttaaaattgtctaatgatccaaaccaccatgctgacaaacggtattcagctgagtggcaaagggaaggakaggtgagtcatatgcacatgctcatcgattaawcctcatcccatgcctcatttatacatacacagagctccaaactgttccctttacatgatttaaatcatcattttatttactsgtcccaaagtagaaatctgaatggacactatcccgaccttgaaccattttatacatacatagagctccaaactgtttcctttatatgatttaaatgattattggctcgtcccaaagtagaaatctgaatggatactatccygaccttgaacyacatgcagccagtttgagaagttctgggaatcaacgctggatgcgtcctagctctaactaatatttcgtgactccagtcaggaacattatggctgcctcaggccagttttctaaattacactctaagtaataaaaaaaggcagaaaaattggagactgacagaggttcttggacaacacaaaatacaataattagagaaacaagaaaacataccaaaacctgaagtagtcaagaacacagcattaacatggatcaaagtgttcttattcttattacatttttaaagaatcaattccaatgatttttaatgactttttaattggtgaaaacataatgatccttgtggaaaacagcatagaaattcctaaaggaaaaataaaatcaaccacaggattatccactttctggataactatagattatacagaaataaccacttttaaaattctggtttaggtcctccagtgttttatctaaatgaatacatcaataggcatacccacacccacacacacctgtggagaggtagcttagggtagttacgattctctagggccagacttcctgagtctgaatcctggctctgccacttataaggtgtgtgactttgtrcaagttacttgacctctctgtgctttaatttttacatctttaaagttgggaataatacttatgtcataagattttaggagaattaaatgggttgatatctgcaatgcccctagaacagtgcttggaatatggaaagcagtatatattgtttatatttttattattatctctaattgtatatagttttacaaaaagcaacatcacattgtatgttatattaaagcttgtgtctttccaacttggtgctagccctttagctgcctcttcatccttttcttatatgttggggtctttgaaagtgctyagtaaataccacctttctttctccatcttaattgtaaatcattttaaacccgagacagacaagtattgcacgtggagtccaaagtgtcaattttaccactaggcaagctcatagtaggaaatgtggcttaaattagaggatccaatggcaagtggatttcctcatagtgaaactccaaatagaaggactttccatgtggtcactggattacgtcagtgttacccacatgagtgactggggtatggagaggaaaggcgtgctgtgctaatggagctaaatatatgcggaggcaaatactaaaaatgagaaacaatattaatcttttccttttctctttttcttcttccaacgtggaaacattttactattcatttttatatgccttacaaaattatgtactgtttgtaatctggctgctgaagcattggtaacaaagcaatggtaacaaatacggtgtatgtatcatcaagtcagtccttggacattttccccacacacataacctaaataagcaaactgtatatattttgctatgtgaagacttggtgactatgactgtgtttacatgatgcaacagtgattagttaatgtatgcaggttggttaaaaatcagttgatttgacaacaacattttgttttatttggtatgacatagaaattgcaatgcctgcatatgtaaagtggggagctgaccaattatgcacattgtaaatctcctgaatttttttcttactgagaatcagaagagcattgaggactgaaattatgttgttaaatatgaatagcgacccttcattcaatgttgattgcatgctaattttatattatatgtttatataccatacatctttcatctaactctattgcaatgattatggttgtgttggtcatttgtttatctggcctcacacccattctctcctatcctctgatcctctctgtatcccaagagaataactcctgcaaactaagttttccactccaatgccacctgacttccttttatgtatgtcagtgggaagtactggtgtgagactggggttgtggagaaggggaaagcaaggtatttctgcctctcacagcttcctgcatgtcagcccttcccttttctgatatagcctttggagtgggagtgactttccactgctgtaaatctctgagttgcccacaatcccacaattttttttagctcttcttatatcattataactagttttccatataatatccctctattaaattatctattrtgagttctattttcctatcaggaccttgacaaagatagagactgtcttcattttgtagaaatattaagtaacttgtacaaaaacacacggctagtttaaaaacaggctttcaaaccagttgtacctaatttcaaagcccaagtatttgaactactatgctgcaatcaagtgatcgttcaaatgaatacccaaatgaatagttttcattaatcacctctttctattacttagctcaaattgtctgcattatggcactaactagctatcatcatcacttaactatctatctctcccaattgtttataaggtcacttgagagcaggcacattttattcatctttgtatccccagtacctactactgtgcttggaatgtagtggattcttaataaatatttgtagaataaatgagtagtaatcactgtcattgacagagtgactattttatttcagcagccctgcaaggagtcttatgtaaattttataactcaatcttcatgacaatcttgcaaagtagtcataaatatttcaatatcagagatgaggaataggcwcaaagagtttaaacagctcacaattaatctgctattaatgctaggctaagtggattacaaggtctgctattttgactatgtctagctgcctccctacataaatttatgtgaaaaatacataaataaatgtgttggaaaaaactcaaatcattttattgaattttcaggtttttttttgagccttataaacagataaagtcttgtctctatgagaaaaaggagcagctcagtgtttacatgccatatattggcacgtaatggaaatacatatgtttgtacttacctagtctacgcagataaaaggaaaataagaattgggataataatctgaagaaatgacatagttgatattgctgccaaactaaaatcasagctggacagtaaagtggtaaaagatttcattaagggactactgcgataggagaaaagagacctcagtgtagtactgggctcaattccgaatatagcttggacagatggagatttttagccaagcagcagggtgggggccaggggatggaaaattactaagaggaaacatcgggagtaaggagggattgtggctaaaccaatgtgacaggatttttactgactgaaggccaggatgatcagatatcgcctggggggttccrggggatgtagaatttgatcaactatcaagatgatcagatatcaagagtgagggattctctccaaacagacttagcaagattctcactacaattaggcagtagagggttggacaccaagactgaggcctagagcacatagaggagtcagaactagacttaggtaaaggagttcatcctgttatcaagtgtggaaaatgctggttagccacatgattatctactcattctctagaattacttggtatggtgtgtgacattgatgatatttacaaccaattcccctaaacacagaattcaggtttcaactttacttttctgttgcttggtctattatctagagttagtacattatctaaagtgatagggtaggtatttttactgatggattgttgatgaaagtgtttacttgtgtttttgtgagttccagtctttgctttgcatggtgaaatcacatgtatggataacattttatggctcagttaagtttctgccatagtttttccaagcaatacattcttagtacctcctctgaatctagaaagtaaaataatacttatatttataagactgaattgcagaatttattattttattctttagtttctggtgaaaatgaaccaakagaagtaaaataatttggtagacaaaatacaaaaagccattgttgattctacatgtaattcattggcacatacttgcttggattagtattggttgaaattgtttcagctggataccacccaagaggctgttcttgtctcacagagctaggagccatttcaagatcctggaaataagtgattttcataagatttttgctrgtgtaaattttttttttcccyagggaaaggatgatctcctaagtcttcttcatgtatgtactactagctttgctgtaaagtaaggcctttatttcattaattygagagtagagaataatgtaaaattaaacacaagcattttttcccagttgatttctaacaatcacaaactatattaatttgtttaatactgcaagagcacaaacaagatttgttttatatttgtttcataaaactttgtattattgttttataaaactttgtattatcttgtgattgagacacatcattaggggctggaagccaacaggtgtcaaaagccccagtgttgctgttcaatggatatagaattacagtcatgcaagatgaacaagttccagagatctactacataacaatgtgtatatagttaacaattctgtactgtgcacttaaaaatgtaagagagtagagttcctcttatttgtgtgttttttaaaatcccaatcaaacagaaaaacaacacaacacagagctatgaccagcaggcatggaagaaatccaacgtttgtgtgagaaagcatactgaagcattacctgttcccatttgaatgctgagaaagagttagggaaataacatgattctccacttaataaaacttcagcatgtctttttcattagaagtgatgattgacagggatttgttggtgacactgtgtggtcctgggagcagaagtcactgtgtaaacaacactgtgctaacaaaagaggactgttcacatggctggcactagcacarcctcgagaagatgaaaagacggcacacggaatttcctgatttggggccaagatggacaacaatgactatgatattaacygttggattttatggatttttattgaataaatggaatagattttgttaatttgtttattttcctccatgaagatgtttgaaatgtatctgaaaatataaaatattttcatcatataagttggaaaactagggaaagtttagggttaatttaatcccatgtaattcttttcaagtgcttagccttaaatattacctcttacttcagttaagataatagttttttaaccccttttttcaatatgttaaaacattttgaagcaaatcttccagacatagtgaaaaaacctgctctagatggttacttagtgtcacaattcatggagggaactatatagaattcccctatatggtgattttctgtggcactacctccagcttttatgccctctggctatatatgaaaaaatagacatttaatatagtaatgtttttagccacaaagaagagtgaaggcaattttgacgtgggagaagaataagttctctcccttagtgtttgatacggtgactatattgggctaagataatggttaggagagagagaagagaaaaggggagagagattgggttctaaatgcacgagaagaaagaaatgagggcagttcagaacaataacctgtgaattttttcaccacttacataccaagcaaattgcatttccttctacactgtctggttctattccaatgtgttttatttaaaagttttatctttcccaatgaaagtttaagttccttggaatctgggtccaagtatcttccacagaaacatacttctctcgctagtttatactctctgtaggcacgtacttggctttcttgctcactgctgaatgctggtgcrtagcaccatgactggcacagagtagatgttcaataartatttgttgtatctgtgagagaatgtgttaaaataacaaaactcaaacataatagtgcagcgactatgccttratgtgtgtgtgtttgggattcagcacatttgtagaggtaaagcagttggttttttaaaaaattagtgccattcaggatcacttgttaaatggatattgtttaaaggacwtaattaattaatgctggggatactgttaagaaatcattctagaaactagaataaatattgccaaagtgaaacactttggttttgatacaaattattgccttagtttcaagatgtaaaacaaacaaaatctttgatgggattagtagaatttatttgagtttaattcaactttttgttttacatataaaaatgtgtgcctgtatgttatacatctgtacatatatttccacatatatctatacctattacgtatagctacatatagatacccatttatatgtttaatctcctaagtcttacatcttagtttgcaatcgtgggattattttccagatcatagaattgtttgttatttttactaggttgttttcatgattaaaattccgtgtctccccaggtttccatgtatcagcagtgccccagaaagtgtttcccttcctgagactctagggaagccttggaatgcaaataacttgaaaagagagcctggccaaaaaaagatttttgagccttggtagggttagtgaagcaggtttttagyacaaacacaactcaaagtatrtgtgttattaaaagtagctattttcatggaagtcttttggtactatttgttttggctagagaagtgaaaagctttcttttaaccatgtgaccattattttgcaagatcataacaaacaattctaatatctttaatctcactaaagagtcactaaagttatttgatgtaccttttgaaatagaaaaccaacaactaaatcttctctaacaccatgattttctaatctgtattaaagcgttccaggtatttttgtaatgcaatggatttcaattatgttgttcattttcagcacttacttcaaaagaatgatgctttacaattttgtagttaatttaacatatttttttgtttgcttgaaagggtagaagtaagacatatcaagatttaaaacataaatagcttggaacaccctgaagagcaacatgggagaaactgagaaaagaattgaaacccatagaayaagatgtctttccaagttgaaggtatggaatttttgtatgtggatatatgtgcatgtacactagtttttaaaatacgacagtcctggtaaaattgctcctatctgcatgaagtgatctaatattaatgccrtattgcctgttctattgataatttcttgcwttaaagaagttggttttataactgagggtgtgtctacacaggattattgattcaggcaagttagtcctaaatggctttgagagacttaaatggaagacaggatcctaaaaatttccaggcacacatactgtggcaggatttatttttctggatcaaaggccatgctcactcttgcagggtttctaacccagagaaatgtgggagtcactctccgaaaatggctcattgcacagaaatgctttgttgatttgtatgcaattacccagcaaaacaaatgttttctttaagctttggcaacataacaataatttcctrtaagaaaaatggccattttgtcagctgttctgatttttttttctatttcagagaaaattctgttttctagcttcaaagtcatttmtattcaaacaaatttgaatttatgataaaccaagggatctggacatttgtcctgattctatagctagtgcctgcaagtggtttcaaaactaagacactgtcactcattttctccctatcagaagtttgttttccatttatatgtgtgttggggaaatttaaacatgtatacaaaattggagaattatgatataaatctaaaaaaaatagacttgcctgaaatggtatgttaattaagaaaaactttttgtgcttcagttttctcatctgaaaagggtaatagcaacattcccaccttataggattcttttatgtttgaaacaatgactggaatattgtaaactttcaataaatattagctattaatattaaaagcatttgtggagaaaagtcaagtggtatttataaacaagaggtctttaatttttgattgctttggagtttagcaaggttagatattaatgtggatgttaagacaaaatgctgtaagcacaagtttatcaggtaaaagtgagaggcaattgcttaatagcaagttaggtttctctgtttctctgaacttagaaatatactcattaagcaaaattcattaggaagcatgaaagaactatttttaacaaatttgctttaaacyttgttgttgaaataagttgaaagggcattattgctagaagctagtaggacyagctttataaatacagagattatttagcactagacatgagtcagaatagccactgatttctttcactctgcgaataaaaccaaactagttaggcaacccatgygttttagggraaaagcaatgaggtcatgatccatctaatttcttttcttaacatgtaaagtagaataaattatttttccaaatttgatttgtacttgatttagtaggacttgcttttaaatataaaatctgatttataaaactaggtgaaaatagtttgctcttaagaatayactctgagaaggtttatagtgggaagagagaatatccacaaatggtattyaatataaaaaatagctagagatatggccatactatgctgtagtcaatcagttttgattcatattaagaatgctattcaaatttctaggtccttttcacataaatttctatttaggtctcacaaaaataattgataaattttggcttagatgtattgtgtggtgtgaatgtgtcccatccaaattcccatgttgaaatcctaatttctaargtgatggcagtaggaagtggggccttcgagaggtgattargtcacaaaggtaaagcctttatgaatgggttcagtggctttataatagaggactaagagagattcactgcattttctgccatgtgaagacacagtgagaaagatggtagtttatgaatcagtatatacagcctctaagccamaaataaaattcaaccctcccaccccctgctcccagcactgaatggacctcctcttggtcaagagccttccaaagttagyctaaaaaacaagtttargctgttatgggaaggaggtgttggacatgcctctttataccctcctctcttttggaattcargaataaccaaccatcattaacatcaacacagaccttaagtctgataagaaacatttatatccattctctatgaagcctgcgtatctagaggctttatctgcatgataaaaccttggtctccacaagccctgattgtaaacaggaaataattttttattattgataataactcttccaaccaattgccaatcagaacattttaaaatctacctgtgacctgcaagttcctgctttgagttatcttgaccttcccaattgaaccaatgtaaatcttacatgtattgattgatgcattatgtcttcctaaaatatataagagcaagctgtactccaccttgaacacatgtttttaggacttctctgaggctatactgtaggcatgccttaactttggcaaaataaactttctaaattgattgagacctgtctcagatacttttgggttcacaaattagcagccatgaaaggattctgagtggaggtgcccctgacctttgatgaatctcctgtgggtacttggtaccagcctgagctatccttatggctcaaactgataggacaatttgctgaggcctgggagcccccacccactccagagaatccccaatcccctaaatttggttaagatctaaaatttatttttctctacaactcctattttttagttttacttgtgtccaacaaagaaggcaagttttcctgcttccatgacaatggagcgtgggcaactcctttctggagtttcagctaatttccaacagggaaggcaagtttgagctttttttttcctgcctgtaagatggtaaacagcagtcttgagccagggtctcattcctagataagtagctgagttgggtttttttttttatctcagcgattctccttaatgactaaaaattagaattgacagccggctagtcttaatttctccttagcattagagtgctcagtaatcatattgttggggttttttgttgttctggtgtttctcccatcagatttgaccaactgtacccaacttggccaaattcaaatgagaattccaaattatgagcagccagacctctgaagctgctaaaattcctcatarctgaaaaaaagaaaacaaacaaattatgcgcttggtttctgttgcagcttcctgtcttaaaaacacaattgttctttcattttcttttcttccacactatttctccttcccccttcactgtctggtaccaaaaaaaatctagagaagccatcaaatgacttgaaccccttaaaacactcagaacaaaggcatcactcaccctttctttctctgtggagtttcaagagtcatgggcagattcttcttaaggtctaaagtgttcttattcaaaggtaaattatttttgtctaattcagaggttatttaaggattatatataaaatgaggtaaaaaggaccaggaaataagagatgtaaagaaagttataaagaggtatttttggtaagaaagcttaaaagaaaagtaattttatatgagaaagaatcttgcatgatgaatttttgtcctaagataaaatgactcgttcaagaaagagaaatatttatgtcaaaccagaaagtccaagcatgttgtaaatggtctgtgtaagttgtaataaggttagtaaaacaggaatttgttaaaatgttatgtgattcagttggctacaattaaaggaaattataatagtttttctaaaaattgaactttgatattaaaagtacactcatgcaacactaaagaactggttagaacaagatttattaaaaatgttgagttactcttaatgcaaggactttaaaatttttgaattctataatctttttctttttaaaattatttagattgatatctcagaacctgtgccctactgcttcagtttttttctcttttgagaaggcctggaatggtaactctctccttcaactttgtttggctcctgtaactttttacttttattttattttttttgaggcagggcctcactctgtcacccaggytggagtgcagtggcacaatctcagttcactgcaccctcaacctcccaggctcaagaaatcctcccctcagccttctgagtagctggaactacaagtgtgcaccacaaagccaagcttttttatttatttatttatttattttgtattatttatagagatggagtgtcacatgttgcccaggctggtctygaacacctagactaaaatgatctgtctgccttagtctcccaaagtgctaggattacaggcatgagccatggtgtctggcctttttaagttaatagttgaaactaagaaacagaatttttgaaaataggcaaatgaaaaatattttggatctgcttttgtctgtatgtctgttatagctatatgtttatatgtgtcatgtagaagtaatatttcactaccaaattatattaaagacctctaatcacttggctaaaagaaaartaagtgcttttcagactgaaggaagctaccaaagatgccttttaattcatatgaccttagtagttttgggtaagactaatctggtaaatttaatctcaaaattacctccagtagtttaacatcttaaagtcatgttatgttaaattaaataactcctatttttttcaatgggaatctgggttactaagagttaaaatagtaggagagtaaatagtgtttttggtaaaatttataaaaatacaatgatgtagcttttgctaaagaatttttttttctaagagttattttaartaaagataaaaatattatatagataaaactaaatggataaagagagaaattaaaagatgagtgaggagaaaccttgactccagggtggccatgtggttacctatggtagggagatgcagctgagctacattcaattacaaaagataaaattcattagaatttagagatggattatgctcccgaggagttagytctctaaatgcataaggagatgcaaactaataaaaaaaaaaaaagcaaaaatattcaatcccttggttattgttatctgtarttgctaaatgaatgtacaagaatgctgggttgatccttaaggctggatcaggcccagaggtgggtctgtcccagctcaagccactagactccaagctacccacagaaagaaaaattaaaccagagcaacaaaagttacctctgagagctgtggttaccaagaagatagtcaatatgtgggaagggcaaaaccaagtaactattaaaaccagagggtataatgcaaagtaattgttccattttgtagatcaatataatcagcttcttgagaaaccttaactactttaaggaaagaatcctttattttgaaggctacaaaatgaaagagcttgtttgggttgatgcaggattcacaaatcactattaaattgctgatgagtatatgtgatccaaatgtatacgaggttattcataagagaacaacctgcctaactgactggataattgctactgtaaggtctgtttactctggaaatgggacttcccaaccatccctataaaatgccaagtggagcaccccagataatgtagttgatatgcttcatatgcaagccatgtgaaactgtctttataactgggatattctcccattgaatatgactagtatccagttcagtgccctgtaacctctcccctcccctttgctcactgtcctggagtggcactggcctctgaagtaattcttttttggtcttgggactagttmaggggaaactgggtgggggaaatccctcctgccctaagtgcagttggactgtacagaatactccaaaggccaatggtagttcagcacagaaagagggaaggcctccaagtcagaaagagctccagagacctcatggtattgtagggcagggtggtgggccaaggttaggacactgcataaaacaggcaatcccaccacctctacctgctcacgccaggagaatccataactgcctagaggcctgagacccctacaagtagtaaggtgaataggcatctatycagcctagcagtaggattgatgtctgtccagcctggaagaggggcactaggtgactccctccccttctgttgtaaatactataattatcagataatttaagttattctcatttgtaactgcatttctggttcaggccagagtcatttggtatttaaaaaaaagactgagtcctttccccatttctcttctctttcccatagattcctccacctttcaaactgttttgtatctatttcaaaggaagatatccctgagactgggtaatttataaagaaaaaggggtttaatggactcacagttccacatggttggggaggcctcacaattacgacggaaggtaaaggaggagcaaaggcatatcttacacggtggcaggcaagagagcatgtgcaggggaactgccttttataaaaccattagagcttgtgagacttattcactatcatgagaaaaacacagaaaaactcacccccatgtttcaattacctcccacaagttccctcccatgacacatggggattatgggagctacaattaaagatgagattttggtggggacacagcccaaccatataattctgcccatggctgctgccaaatctcatgtccgcacatttcaaaaccaatcatgccttcgcaacagtcccccaaagtcttaactcatttcagtattaacccaaaagtcctaacttaggagccakcaaaaaaaatcaaaagcaagttagttacttcctagatacaatggggatacaggcattgagtaaataaacccattccaaatgtgaaaaattaaccaaaatgaagaagatggaggccccatgcaagtttgaaatccagtgagcagtcaaaccttaaagctccaaaatgatctcctttgactgcgtgtctcacatccaggtcacactgatgcaagaggtgggttcccatggacttgggaagatccacccctgggactttgcagggtacagtgcccctctcctggctgctttcatgggatggtgttgagtgttctgtggcttttccaagtgcatggttcaagttgttgatggatctaccattctgggatctggaggatggtggccctcttctcacagctccaccaggcagttccccagtggagactctgtgtgggggcttcaaccctacrtttcccttccacactgccctagcagaggttctccatgagggtcctgcctctgcagcatacctctgcctggacatccaggtgtttccatacatcctctgaaatctaggcagaggttcccaaacctcaattctttacttttatgcacctgcaggcccaaccaaagcttgagacttgcaccctctgaagcagtggcctgagtgtacattggctccttctgggtcccatggctgggacccagagcaccaagtccaaagactggacaagaaaaccattttttttcctcctaggcctctgggcctgtgatgggaggggctactgtggagacttctgacatgtccgggagacattttccccattgtctrggtgattaacatttggcttctcattacttacgcaagtttctgcagccatcttgaatttctcctcagaaaatgggtttttccttttttatcacatcatcagtctccaaattttcctaactttcatgctttgcttcccttttaaacataagttycaatttcaaaccatatctttgtgaattaataaaactkaatgctcttaagagcacccaagtcasttcttgaaagctttagtttgaaatttcttccaccagataccttaaattatgtctcttaagttcaaagttccactgatctctagtgcaggggcaaaatgctgccagtctttttactaaagcatagcaagaatcacctttgctccagttcccaataagttcctcatctccatctgagaacacctcagtctggactttattgtccatatcattatcagcattttggtcaaagccattcaacaagtctctaggaagtttcaaactttcccacatcttcctgtcttccgagcccttcaagcctgtaggaagctccaaactttcctacattttcctattttcttctgagccctccacactgttctaacctctgcctgttacccagttccaaagtcatttccacatttttgggtatctttacagcagcactccactctctgtaccaatttactgcattagtccatttcatactgctgtgaaaaaatacctgagactgggtaatttataaagaaaaagaggtttaatgaactcacagttccacrtggctggggaagcctcacagtcatgatggaagatgcaggaggagcaaaggcatgtcttacatggtggcaagagagcatgtgccagggaactgccctttataaaaccatcagatcttgtgagacttattcactatcayagaacagcatgggaaaacccacccctatgatccaattacttcccagtgggtccctctcacagcatgtggggattatgggagctactattcaagawgagattttggtggggacacagccaaaccatatcacatggtaaatttggaggttaagtgctacatgggcactccaggtgacattactaccacagaatcacagactgatcaaatttgctgtcctcatgggtyttacagatgcttaataaaacaytggggtaattaacaaagaataatgagaaaggcaaaagggagtcagaggactcaccccagagggtgattaaaatatttggacgttttataagaaatgaaataaataaaatgaaaattgatggggttgaaacaaaggtctttacaacactatcaagggttgagtggaccaaagggaacccctactgatcctccaacattaaagggccccatatcagttttctgcatttgccccagattggggaaattgaagaaacagcaaaaggcaaaggttataatgagggagctgaaattgcctggggcaaatctgaggcaaattaagatgaagattgaaaaaagagcccaagtcccttggctcaatcccttgctgggaactcaaatcatttttcaccagaaaaagtaaaatggtctgggggtagaaaagaaaagttcctcaaaccagaacataaaaatgtacaggttgataggattatgaaatttgagatgtctaaacagcctttatgtaaggtaattttaacttcttcacctaaatatcttgtgaaaattggtattgtatctgattgggggatgtttctcctatcaagtactatgaaactgaagtcatgtaaatgtgccctttgaggaatgtkaattggacacactaaatggaaactagtaagattgcctgagcctacacaatgtagggtagaagctgaagggctagtagggacaaattctccacttcatatccatttgtggagcatttattagggcttatggtaaaagactgggagcacttcccratgacaaatactagactagagaatttccagttgagggacatttactgccttgttatggaatgttaactgaagctacccctttgctaaaggaaataatggtaccccaaagagttccataataaagtaaaaattgtttgcataggatcttgctacctgaggatgcagaggagatacttatgagcagagagcattctttttcccctagggctgactctgactctgtaaggagctgctagattctacagtgcctggtaaacagctctcatataacaagaactgcttagcatgtgaatggcaattcaaggtgaacaaaggacatgttgtttggaaggctgatgctctggttaaagagtcaagagaatctttttcttttaaattatttattctttagagcaattgggtgaagtatgtttttatgagcaaatttacctttctctccaagttctcccaaatttggaaaccgtgagtattctggttttatgacaatatagttatttgcataagtttagtaagagtcttttgttttawaacaggacaattggagacactgattattttaccaagtctttgactagaataacatatttgcaggtaaatttccagcaaagccaacttaaaaagagcctatatggtcagtcaatttcttgctgcactttatgcaaataatcaggccaagtataataagcctaaaacttatttttacacacaaactggtcttactataatttctctttaatagaaaaggagggctagagagagagaaaaattgtttcaaaggaaaaatttaacacttgttactggatttcagccctgacttttgtttttgaatgcagattgaatcatgaattatttcttggctataataatcctctaaagagatagcggattatagtttttctttacatttttagttgaatccctaatgagatagcttccattttccattctgacacacamatactcttttgattgtcaaaatattaatgttatttatctctccttggttyacttccaaggaaactggaatgatggtattctcaagactagagatgcaaatctctctcatttgtcatcccactgagcccgatctgtttttcactgcaaatgcccttctgttaagactatacaagcaccctccctctaggcctaaggactgttgtggaagaggtgggtgtgtgagattgtaagggctaggtttgaggaagtgaattagttcagatcatycaaaccaaggatgggtacacgatgcctaaacagctggtaaaacaaagttttttgccctctgagctattatgaggcatcttttcatccagcccaaccatgaagaatgtcatgctatttgtagaattaaaagaaaataactactgagaggataaagataccttgtgacaaagccttctggatataagactcccagttatgagctgtgcagatagatagatatgtatttttaaagtttattttcatttatttatttctttttttgagactcactcagggtcttactctgtcacccaggctggagtgtagtggtgccatcaaggcttactgcagccttgaccttctgggctcaggtgatcttcacacctcagcctcccaggtagctggcactacaggcatgcaccaccatacctggctagctttttgtctttttgtatttttttagagacagggttttgccatattgcccaggctggtctcaaactcctgggctcaagccatgaacacaccttggccttccaaaatcctgggaatatagatgtgagccacggtgcctggtcagtatatattaaaaaattatttttcagagcaatgcttatgttttgtgtagctaattgctataagtccataactaaaaccaagattatagtagctcwatgcatagaagttaaagataagtcagttttgtaacctggcctttggctttctgtttgttgactttttactgaaaaaaatttaaggggtaatgaatacttgtccatgtccattcctatctggcctagaacatttaatttgctataagtcttttgactctaagtaccttggccatagggggtcccactgagggacagggtggatctcaagcaggcagccatgccacccccacaatggtatgagacaaaataaaaatttggtaracattgctgttgcctctggcaaatcttaggtggaagagggagaatgtaaagcaaaaataaaattctgaggaccccaaccatctgaatggacccttcctctcagccaaaggcattccaaaattaacctgaaaagcaagtttaggccatgatgggaaggaggggtgggccagacatgcctcattgtaccctcttcccttttggaattcaggaaaaaaccaaccagarctaacatcaacacagactttaagtctgacaagaaacatttacatctgttgtttctgaagcctgctacctagaggctttatccgcatgatagaaccttggtccccacaagcccttattataacccagatattattttctattgataataactcttccaaccaattgccaatcagcacattttaaaactttaaaactacctatgacygggaaccccctgcttcgggttgtcctgcccttccagattaaaccaatgtaaatcttacatgtactgactgacgtattatgtctctctaaaatgtataaaagcaagctgtgccctgaccatcttgggcacatgttgtcaggacctcctgaggctgtgttatggccacatccttaaccctggcaaaataaactttctaaattgattgagaactgtctcagatacttttgggttcacaggcatcagccaacccaaatttgttagtgccttgctcttggactttccagtctttggaactatgagaattacatttctgttgtttataagccactcrgcttagggtattttgttgtagcagcccagatggatgaaaacagtatatttaatcttatttgattttattttactttcagctctgatttcttcaagatgtttttgatacttattctgtcattaattcartaaacttgtattgggtgcctgctatttgtcaggcacttagtaggcaccagggccacaggggtaaataacatatggctcctgtatctgacttgctctcagaataatgagagaggaacttatagacatctaaatccataaataaagtacactgtaatagaggttgtaatcaagttaggcacacagtagggtgggaagataaagaatgaatgaatggttagggcttacctggggagcacagaggcaaaagaggcctcacaatggaagtaataaaatacctgagtcttgagaatgaattatatattgaccaggtgaacaaagggaagaaaggcattaaaactggaggaatattatacaaaagcactgacctataaaatggcagggttaattaacacagctacatgtagaacactgtgtctaagracaagcaacaggagatgatactgaaatayagatgaggctttgtttaccatcttaaaaatcagagatttttgtttatgggaattactgaaaagttttaagaagtaaaatttgctaactatgtattttattaatttatttgacaaaaaattatgatccaaattagtggaggtggcgtgtgaaagagaggttggaggtagacaaggctagaggagagtaaacaggatttcaattgtctragctaaactgttcatacatatgagaggtttcatcatacgtgtggtagttaaaagcatggatgagcatgaacttcctaaagacagcatgcatagcaaaagggtagggagtacaagacagaggcctgaaagggttgaccaaagaagagagaaagaatcgagcagttagtcagagatataggtatgcatgggggagggaatttcaggaagaaaagagagatcaatagtatcaaatgactgagagtcacgaagtaagatggtaattcagacatagcttgtggatttgggatatttgggaatcaggaagttgtttatgaccttttatggaggtagtttcaagaaacaccagcctgtagcagactatagggtggatggaaggttaaacagtctagagtctagaccattcttctaaacagctttgtggtagctagagtagctaaccatcaaggctgagggaaggtgttttgttttgtttcatttygtttttttctcaaaaggcaagaaatgccttggatatattaataagctagtggggaaacaagcaataaagggtgtgaggttgaaaatagagagaaaagcctgggcatggtggctcatgcttttaattccagtactttgggaggccaaggtgggcggatcacctgaggtcaggagttcgagaccagcctggccaacatggtgaaaccccgtctgtactaaaaatacaaaagctaaccggtcatggtggtacacacttgtagccccagctacttgggagcctgaggtgggaaaattgcttgaacccaggaggtggaggttgcagtgagccaagattatgccactgcactccagcctgggtgacagagtaagactctgtctcaaacaaaacaaaacaacacaaaacaaaacaaaaaagagagagagagaaaagagcaataacggatgaattagaatctcgaaaatgggaagaatggattcaagagcaagattggagggattttatgtacaggaaagggacaccaatctttctaaagacataggcaaattagagaaggtagggatagaggtaagtttgcaggtgaagttgctgatatcatttgctgatcatgaagagagagaatgtggctgggttggagactgagaaacagaaaaggttgtgagttaacttgaaaggaatatgtgaggtagaaaataagttgtgtgattggctcaagactggaggtgtggaaggtggaaggtgtgagaattttaagaatttgagtgtgctaggtaaatagtaggtcaaatggtctcccaggttgcaagtgtcatcagaaactgtcttcaataggaccaagcaaaaatctctatggcatgtgactgaagaccaccattcaagttgatgtaaatctatctataatttgttcattttgaagcagtaattaatctacctaactatactattaccagtatacagtgctcctgttttaaaacctcttactaaaagctatctttttaaatttaattttaaaatatgaattttaacttttcatattttcagtaaaaccatagtagctcctggtgatcacagtggttctatctgtgaactcatccctgatgttgttatggattgcatcaacctcactgtttcctggaactataccaataataggaagtatgattgataaaacctatggaaatttatagtatatatattaggcargcagtaaggataaacagaagccaatggtccaggtgagctgattctccaaggttcaggaaagcttcccaaaataaatggagtctcatttttgtgtggtcctccatttacactgcagctgagaaaccctgaaaatactctgtcctgggcttatatgccttagacacaactgggattgctgagctcaagggttgcagagcatcctactatgggaagaatgaggacataactcagattgttctggatatttccctcattgctgagaatgcagaatgtttctgaccaagaattgcaagcaagaacaggaaagagtggagtcggccaaggtaatctggggacctattgtcctgcagagagaacttaagtatatttgctaccgaaataatgtctttgtataattctgcattctttcttttcattacagtacatgtatgaattcttttgtactttagatatcattgtagctctgaagacatgtttaagttatcagctatgtattacttagaatgactgtttgtttctatgtatgtaccagtatgttatacaatattgaggctgcaactgcctacaaaattagtctcactttgagttttcagagagaaatcacagtatgacagacaaaaggagcagactacactttacagtttcttgcaaattcaaaggttacttaagttggagacaatsagtcttatggtggaaggcattttgtcaacagacggcaagtatacaatttaaaaatawttttttctacgttttcttatatttttttcctagatgtttctgttggcaataacatgtgcatttgtatccaaaacactgtctggatcttatatgaattccatgctcacacaaatagagagacaattcaacatcccaacatctctagttggattcattaatggaagctttgagattggtaatgaattatttttgcatttcttctttttgtattttgtcttatctgtggagctagtctgaattttattctccttatttgctgttttaggtcatttaatctgaccgagttataagttttctaaaactaactgattagctaagcttagaatatgcttggaaataattcatttaaatattacctcatattaacacctamatattgccacatatcctaccattgttctttttattctaatagtttcttagttatgtagcatgagtagcagagtatttacagtatttatatttaaatatcatttgataaccctaagggatactaagggttccatctttgtatttagaagatacaaaggtagaagaccgccgggcgaggtggctcatgcctgtactcccagcactttgggaggcggagatgggtggatcacgaggtcaggagatcgagaccatcctggctaacatggtgaaaccccgtctctgctagaaatacaaacaaattggccgggtatggtggcgggcgcctgtagtcccagctacttgggaggctgaagcaggagaatggtgtgaacccgagaggcggagcttgcagtgagctgagattgccactgcactccagcctgggtgagagtgagactccatctcaaaaaaaaaaaagaaaaggtagaagacctagaagatgtagaagatattgttggagatcaaggaaattgccttacaaatgaaaatgcaaatatttttctgctatttggtctgggaggttgacaatttttttttctaagtacagagagaagaaaagactgcttttatagctctctgaattcatttcagaggcagcctctagagaaaaataaagtctactcatagattctgatttttgtggatgactgggaatatgtgaccatagagagggagaatgggggaaaggaagatttcttccatgaaaaaagttatatagaaatataagtgtcactcctttctagttttataatagcttccactttcttcaaggtgataatttcctttaatataaatgtatttaaaaaatcaggattgaggagaagcaaaactgaaacaagtgattcttgatcttgtctactagtgttcaactcctttagatcttagcctgtatcacctgtgtgctgatcccagtgagagagttagaactaactccatgtatagcccacgaattgactcagctcataatctaacggaaggtagagatgcagataataatagtattaattgaatgaagtaagtttggtagcatagatatatacaaggtcttacagggacagaagaaacacagactcatttagggaagccagactctcggaggatagctaaaattttctaggagaagaaatgaggttaagcaagtgtgaagaaaattccagtagaaaaagcctaagaaggatgcagygcaatagcctatgtgagaagcaacattcagcttgataatattggctagccaagataaagttggaaaggattaggaatgtgagcctgcagaaatgggcaggggtgagaaatgggttaatgagagctttgtgtgcctgctatggcatttactttttaattttctaggtgagggagtgtcactgaggattggaagggattattaacctttctgtgcccaggacccttttagcattctaacaccatatgatcccggagtaataattttaattgcataaaaaaaactatatgggtgcaaaggaagccaattatattgaagtagaattatcaaaatattaaaacaaatttttatatagtartatttgtacttttaatcaacccattaaattaaaaagttactaattttaaagtaattattgtgtcaatgttttgaattgtttgcaacagccatattgtcatctgaacatatctgtaacttctattggtgacaattggtgacaaagttatatgttcacattgcagtcatgtgagtctgaagcactggggaactatctgggctggagctattgattagcaagtaagtaggcgtttgctaaaactagagagagaatttatgaggttattcagggagaggatatagggtgataattacaatggacaaagaatagatcttgagctgcacaaacatttaaggcacaggtagaagaaaaggagtctatgttaagagaaggaatggtcagagaaacaagagggggaactaggagaaaatggtattatgaaaaacaaaggagtagaaatttgaaaaaaaaaaaaagtatcagcagtgtgaaaagcattagaaatatccagttagacaaggatgaagaactattccctgggtttcataatatggagataactgatgatctttgccagggcactaacaaatttagacgctaggaagcagtgaaggtaggagcgacgataggggattagggaggggggaaaagcggaatctatgaatatggatgaatgttctgggaagtttggagagaaactagagaatatgtgtaggctaaagtctagttgagagagagaggcttaaaatacatatgagagattttaattactagagtaagtggctgaagaaaatggcagtgccctggtgatgtgtttagtgttgggtggtcagatgggcaccacaacttctcaaactgaaggaacgtggtaaggccatcaggtggaaaactcaaatgccttcatgtttgattgccccaaatttcttgataaagtagaatatattaacaatttctaccactagtgggtggtgataggtagcttgaggagaatgatgattagaaatagtgtgaaatttacaaaaggcaataaacatatcacttagcttatatttccccagtcagttttacaggcaacattctccatacctttgaaaaaaattacttaccttttcccatgctttctcattgcaattatttcctgacagagcaaggcagtttaaaacatgaactcactcttacgtgaagaaggaaagttcttcctttcttctcctttcaaaaarcagatatggatttcaaacaatggcctctggagacactacctgtaacacggatgggcttggtgatgagattttagaaaactagagaggtcaatgtggctgatatagttattgcggtggggcgctctccatataaaataatggacaaatggacatatcttctacacacaaggcagactagagaaaaatacaggtggaaagaaaacttttcaaaatatacaccacttagaaaattattaactccttgaggaaaaaaaattttgaaatttttataatcttgagtcattgcagaggcattctttatatatagtgggggcaaggtagatattatttactgaattaaaaatgtatggtttgcaaaaaacttaytcgtatatttgtttttttcaaatctttattccacactcttcaaggatctgtccatcagatgggccttcccccattagtttctttattctaaagcttcgtcctaagacatgcggatacatttttcattgccatttttattcctcaaatccagactcactgaagactgagtagaagtgggggtctactaatttttacttcactgcattgtctgatctagggaaagaagtagaaaaaaaatagatccctgtcttggtcatgttgaccaaaatgaagatatttttaaacaatgagttacaaaacattcagctacctaaatttgacttttgcttctctttctgggcataggaaaacatgataatgttctgtggagtaggcattgagagagaggccagaggtcacatgcaggctgacaccttcttttgaacctcatttcccaagtctagatagtcacaaatagagccttccaaatttcccagaaccattctttagtccctttcaccggcttctcttcttctcccctctgtaaatgttggtgtttcagagatatctgtttctgtatctgtctacattgcaaaacagaacccttcttcggggcagggattgtgttatattcatttattatttaatgcaaccctagcacaaatccaagtatttaagatagttgttatgcagtaaatgctagaatgtaaatgattgggtgaggctcttaaktaagactttgttcatactttttaaaatgattattctcaattttttcctaggaaatcttttgttgattatatttgtgagttattttggaaccaaactgcatagacctataatgattggcattggatgtgtggttatgggcttaggctgtttcttaaaatcactacctcatttcctcatgaaccagtaagtactccagtctgataattttgggtggtcaaatttcacttgcaggaaatgaagttgcacttycctctctaggagcaatgctttcyaacagcatagggcactgtaatgggaaggggaagatgcacattctgttyyatctgtctatttggtgctcttggctgcctcacttccacttaagcagtcagttttgtcaatttacacratggggatttgggaccttttcttgtggagttgagtctggtgaaaagattctcaggaccagcccaaacttgggattattcccttctcaggaccatgtaaatacttctaattaataatgagattctgcttaattgcagatcaccaagagacagagcagtctgaaggctgatttttcttttaatttttaccaaagtaactatgtacaaagtcataaaaataaaaactattacaaaaaagcttacattgacaaaaagktctcccttgtcacttattactgctttccagaggcaagtgcttataacttttagctctttcttgtatttgccaccaatttctttcttttttttctgtttttttttttttattatttattattatttttttgagacagtcttgctctgtcacctaggctggagtgcagtggtgtgatctcgggtcactgcaacctccacctcccaggttcaagcaactctcctgtctcaagcctcctgagtagctgggactacaggtaccatgcctggctaattttttgcatttttagtagagacggggtttcactgtgttagccaggatggtctcgatytcctaacctcgtgacccgcccgcctcggcctctgtttttatttttgttgagacagtctcactcactctgtcgcccaggctggagtgcagtggcgccatctcccggttcactgaaacctctgcctcctgggtcaagtgattctcctgcctcagcctcccgagtagctgggattataggtgcatgccactacactcagttaatttttgtatttttagtagagatggggtttccccaagttggccaggctggtctggaacccctgggttcaagcaatccgcccacctcggcctctcaaagtgcgggattacaggcatgagccacctggccmagccttgcctctgtatttctaactaaatgttattctattagttttgaatcctggcataccctgctttactgcatttcactttattgcactttgcagatattrcatttctcacaaattgwaggtttattgcaaccctrcgttgaagattagaatcatttttccaacagcatgtgctcactttgtgtctgggtcatatttgataattattgcaatatttcaaacttttgcattatttttgtatctgttatggcratctgtgattagtgatcattgatattactaatgtaattgttttgatgtgccactaacttatgcccatttaagatggtgatttatttatttatgtatttctttttagagatacagtgacgcccaaggtggggtgtagtggtgcgatctcactcactgtagctttgacctccacaggctcaggtgatcctctcacttcagcctctccagtggctgaaactacaggcatgtgccactatgcctggctaatttttgtatatatatatwtttttttggtagagacaggatttcaccatattgccctggctggtcctgaactcctgggttcaagcaatgcgcctgcctcagactctcaaaatgttgggattacaggtgtgagccaccgtgctggtcttaagatggtgaatgtaatcaacaaatgttgtgtgtgttctgactgctccactgaccagccattgccccattttttgccctttccttgggcccccttattcccctagatacaaaaatattgaaattaggccaattattataataaccctattgtggccttcaggtgttgaagtgaaagaaagagttgcacatttctcactttaaatcaaaagctagaaatcattaagctcagcgaggagggcaagttgaaattcaraataggcccaaagctaagccacttgcaccaaatagccaagctgtgaacacaaggaaaaagtgctatttcaaggaagacacaaatgattagaaagtgaaacagtgttattgctgagatggagaaagtttgagtagtctgaacagaagattaagccagccacaacattcccttgagccagaagagcaagactctctcttctattctacgaaagttaagagagattaggaagctgcagaaggaaatttttaagccaagagaggtgggttcatgaggtttaaggaaagaagctgtctttataacataaaagtgcaaggtgaagcagcaagtgctgatggagaagctgcagcaagttatccagaagatctagctaagttaattgatgaaggtggctacactaaataacagattttcaatgtggatgaaacagccttcttcttcttctccttcctcctcctcctcttcttcttcctcttcttcttctcctcctcttcttcttcctcttcttcttctcctcctccctcctcctcttcttctcctcctcctcctcttcctcctcctcctccttcttcttctccttctcattctccctctccttcttctttcttctttttgagatggagtctcatgctgttgctcaggctcgagtgcagtggcgtgatctcagctcactgcaacctttgactcctgggttgaagcaattctcctgcctcagcctcccaagtagctgggatcacaggcacctaccaccacgcccagttaatttttgtattttttgtagtgacggagtttcaccatgttggtcaggctggtctcaaacttcagacctcaggtgatctgtctgcctcggcctcccgaagtggaaacrgccttcttttgaaagaagatgccatctcggactttcagagatagggaggagaagtcttttcaaaatattactgctaattgacaatgcatctagttgcccaggagctctgatggagatgtacatggagatgaatgttgttttcatgcctgctaacacaacatccattgtgtggccacaaatcaggagtaacttggactttcaagtcttattatgtaagacacacagtttgtaaggatattgctgttayaaatagtgattcttctgatggatctaagtaacataaattgaaaaccttctcraaagaattcactattctacattccactaggaaaaggagaggagggcaaaatctcaacattaacaggaattttgaaaagttgactcaaatcctcttagataaccctgaggggttcaagatttcagtgaacaaagtcacaagactttagtggaggaagtcactgcagatgtggaaagagaaagagaactagaatttaagatggaacctgaagatgtgacttaattgctgcaatctcataataaarcttgaataaatgaagactttctgtttatggacaagcaaataatgtggcttcctgtgatggaatctactactgatgaagagcctgtgaaaactgttgaaatgacaactaatgttttagaacattacacaaagttaggtgataaggcagcagtagggcttgcaaggattgactccaattttggaagaagttctactgtgggtaaaatgctatcaaacagcattatgtgcggctgggcgcggtggctcacgcctataatcctagcactttgaaaggccaaggcgggcggatcacgaggtcaggagatcaagaccatcctggctaacacggtgaaaccccgtctctactaaaaacacaaaaaaatgagccaggcgtggtggttggcacctgtagtcccagctactcaggaggctgaggcaggagaatggcgtgaacccgggaggcagagcttgcagtgcgccgagatcgtgccacttgcactccagcctgggcgacatagcgagactccgtctcaaaaacaaacaacaacaacacaacagcattatgtgctacagaaaaaacttttgtgaaaggaagagtcaattgccrcaggaaacttcatcactgtcttattttaagaaatttccacagcccccacaaccttcagcagccgctaccctgatcagccagcagccatcagcgtggaggctaaagcctctaccagcagaagatgatgactcgctgaaggctcagatgattgttagcatcttttagcaataaaacattttcaattactgtgtgtacattgtgtttcagacataatgctattgcacacttaataggctacaatatagtgcaaacataacttttatatgcattagaaaattaaaaaaattcatgtgagttgctttattgtgttattcactttattgtggcaatctggaaccaaacgtgcaatgtctctgagatatgtctatacattagtgttacacaatatgtattgaattcctactataaaatcatttttactatttacatttgtataattatgtaaatcttttttaccactgaaccatgcgcttatcattctttacttatataactttttattttccctagatttaataattacctcgttatatcatatggttagctttctttgtattgttcacgaattcatcaccaaattctccactggtagggcaaatgtctcctcaatattcttatccatatcacagtgtattatttttgtcttggagattcctcacatatcactttcaattctccatctgcaatctgaacttggaattctctaggcctgctgcattgctatttycttggaattttctctcatyattatccttgagaatttgctttttacctgtttcatacattcagttattcattttctgggatgtcatgtctcctgctttcctctttcctcttcacttgtttttgtgaaggaaataatctagtagctttccaagaaagtatacaagagaaatataaaatgtaagactttgtatatctgaaaatactcctattttactcccatatttgattgttactttggcttggataaaattctagattggaaatattttccctagggattttgaagacatttcccccaatgttttctagctctatctaacacttgtaatcaagtgttattattcagaatcctatgccgttctaatctctgtgatcagttttctttcagtggaaactattggaattttcttttaagctccaagtccaaaattcatgataattgtcttggtataaatctgtctcctccattgtgccaggagccttcaatctggacatttggaaaagttacttttgttatttctttgataatatctcccctataccttctttcataacactgttttctctttctagatctctattacttgaatattggacatcctgtattaaccttatgtttttctcatcttttatccctacttttttgtcctcttgtcttcttgttactttctgggagatttaactttattttccatgcctttgaatggctttctagcttatgctaccacatttttaattttcaagggctcttattctttgaatgtccctttttaaggaacatactattctttcaagaatgcattatctcttcccatctaaattttgttcatctttcttcttggtctctggctcctccaagtgtaccgtttttttatttgtttgtaactgtctttactgttacagacttctctcatatatctggtggttgtttgttatctattcacatttaagagggaggaataacaacaacaagaagccagctggaagttctgtaaatatgtgtaggacttggttaaaggaggacttctttgtagagtcattacgcagggactggctgtttcgcacatggctcagaattgcagataacctgttatcctagacaggaattcttcaatctgttccttgggaggtagaagcttagctaccagccaaatggaagttggaatctcactgtttaatatgtagatatgtagatttttttaacttaatacccccaatttttttgtattgcctttctatgctcagtgtgcctctccagactctggagtcaatgaacattttcagctggagtggcaggggatgtctctgggagttgaatgtttcttaaacaaactttaaaccaaaatgtttgcrctcttattgttttggatcatactcacttttgcatttaagtatcttgcctgaatgttcctgggctttgcagcattgcttccttgcaggcacttagagttgcacttctcatatcttttatttcagtgaccactcagttacctgcttttccattttgaaaatcttgttgagctctcttttattgtaaaattccctattttttttatccttgtggaatcatgcctttccccattctgtttgaaaatctatttaccgtcattttgctgatgctttgggaatgaatagactttgagttaytggatttttagtggataaattaacaaaacatattttctcttttaaagtatttttgaagggatcagagtttctaagcagagtctttccttttcttttatttcctagcctatccaaaacaatgtcaagtaatattcagccactgtatacatttctttctaccacctgccaaaggtgttatttccttgaggttgtcatgtctcataggattgtgagtatggagacagaagcctttgtctatagttcacagccaaactctttgggcatcaatgagcaattgttctaaggggaaggtattttgagcctttttattatatcctatagcacagaaattaagactatcagtggcatccaagcataacactctagcttttgtagaactcagaagggcaagttttcttctgactaccttatttaatagaaatacagaaaacaatccagcattatttctaacaaacagagacttcactgaacatactttgaacatactttttttcccatcttacggcatgtaatttactttctgaggaaaagcatgtggatcttgtggtaatttgcttaaattaaatggtcatagtttattaatccatttgttcttatgagaagagaaaaagtcattacattatgtgtcatggtgattgagattctcttaaggcctctcattatgatggacaaatattttggtttttttaggggtttatgaaacgcatggaggagttattgtacggtttctcagaaactggaggtttcgcttcttttgagyaaactttagagaatgccaagttgaaggcttgttttgttgttattccttccaaagcatttatcttcttaattatgcattattgaatgtcacattttttaaagtttgtgttccttatctcataataattatatccaggaaatgataacctaaaaatcaaagaaagttgatatttgataatctaaaggtagatcatccacaggcagattattgaaagctaagtataaaaagattgttcatttacagaaagtggcaagttttttgatgatattaacttatgataacttggatgccaaggatgaaaagccatttttactggatttggatattgtgttgtatgggaagcagaaggtaacaatctgcacattgcccacattgtcctcattactttcttaaaataaactcattttccctgtgtttatacagatatgaatatgaatctacagtttcagtttcaggcaacttgtcctcawacagtttcttgtgtatggaaaatggaacccagattttaagaccaacgcaggatccatcaggttgtctacttcattgtattgatttttgttcagcgaacttataactaaacactttctgctgaggggcttgaatgagatattgattgagttagayaaataaacaaagatatgttctctctccaggaacttccaaaggagttacaatgggcaataagaatagctaataataaagaatgttatttttcttatatttgaatgtatttattgagagttccttgtttatttattaacatgttatctaaaaatgagtcaaagggccgggtgcagtggctcacgcctgtaatcccagcactttgggaggctgagacggatggatcacctgaggtcaggagttcgagaccagcctggccaacatggtgaaaccccacctctattaaaaaatacaaaaattagccaagcatggtagcgggcacctgtaatcccagctactcaggaggccgaggctggaggatcgcttaaacccaggtggcrgaggttgcagtgatccaagattgcgccattgcactccagcctgggcaacagagtgagactctgtctcaaaaaaaaaaagagtcaaagacatctatccaaggaccactgttaagttcatcccacagaggaaaacatcttataaggatggatttatgctgatgatttggtgtatatgattatgtaaataggaactagagacagaaacaaagttcaagagatttgtgttctatcactgatctttaatagcggggaaaacaggcaagtacgctatagttctgaattactctattccctttctattgactkakgaacttgtctttctgctctttttttttccccctctactggagatagtgctttaaaattctacacaatagcagtgcttctttcagcttctggtagccctaggcaccaatgtactggcttctgccccttctgtcccttctgctaagagacttgtataatcttctggttatacttggtctggagatgactctgatgactcaacatttttatggggacatttttattctggattcatgttygtggaaattgcagtagtccacaagggtgggaatttcatgaccatcattgagtcaggaaaccaaaacagtttcaaaaatttgaaaaatgtctgtctcagaagaagccaaagaacccccatgggggaaacaaaggaaaacartgacattaatagtggcctgtgttctcttcctgagckggctattgccaaagactgacccaggtgctagtcggcttcattgtggatatagcaaaaccttcccattctggcacatctccaggaaggtggattgatgctttcaattttgccctagaataggcctagagtttgcctgtgatctctagacacaaatcactttgtgcatcacacaaacaaatctgaatacctagaaatagagactattattttccgactggaaataatggagagatagcactcacaagaaattcctggacccagctgtggtcaggacctcacagtctcacctggcaaatttataggaggtgagagtgcattgtccttcagatccctgaaaacgggactccacagagcttcctcacagcttaccagctattttggcttagaacatagatggcaaagagatttacagaatccttcagagatctccctatctttctcagtttctattccctttggtctagtctttgttactctactaagcagctgcggctccaaggattggagtggatttctgtattgaaagttatttggtggttacagtatacaacatgctctatagagaacctatgatgattacccaattaaatatttttagtttctatgaaataattagagctgtagagaattcacactttagcgaacttttgtttaaatcttataaatatagtaccaattctagagaaatatatttttgtctccccaaagttgggtaggaatggggaagcacttgtagcagctgaatgagtccaggagttgtggagaaactgaatctctttgatttttaatgtttgccaatttctgtggtgtaacactgctatgaaactaccaatgaggtgtcactgaacactgagttgggaggaggtgtgtatactcatctctcccaactcagtagggactggctccagcatatcacttacacttgtccatactcaagtccactgtcagaaaatgcactaggggtgccctgagaagtcactgctggaatagtaatataaatcattgacaaggggccatggtcatataactgtgaaatgcctacagaaaacatagaattaatattactgacactttatcgtcaaagcactaatgtcatgtcttttttttttaatgcagagtgtacaaaggaagttaaatcattaatgtgggtgtacgtcctagtaggcaatattgtacgtggaatgggtgamactcccatcctgcctttgggtatttcctatatagaagattttgccaaatttgaaaattctcctttatatattggtaagtatrgaaatctaccttagcttcttttcagggcaatatgttccttgaggttagaaattagttatatttttgtagtcttagtgatttccacaatgatgagtagagtrtcttggcacagttggccttccataaaagtttgttgaatggagatgagatatgctaaatgacaatgagctacttggttaataaatctactttctactattggaaataccacaagtctagtgcccctggaggtgaccctttcatctgcttggcactacactacatccaatctgttaagagatttgcaaatgttttctctaaaatgttctgtgcattcaaaacctttctcgctattttcactacctctgtttttgttgaggttctcattactttgtctgtagtttctctttattattttctcttcagaattytattttctcagtttttaagaaacattcttgcaatataatttttctcaagcattgttttaatcatgtcttctctactatatttatgacacatataagctcctcatttattaaatctgatctgtccacttattactcatggctctgcatgacattcacttacttagtttctatacagtttctcttcttaatgatctctccatatagtcaggcttcttcatatttttcacaaatacgtcttcatctttttgtttatgtttcttgaaattaccattttaaaatccatgtaggtcacctggaacaatagccaacttaagacccaccttcttgtgctgccttccaatctctgaaatattcttaatttattatgcacgacttgcttatattttttgttattctatcaatagttggtcataaactcataacgtttagtatagggacattttgccattaatgtatgtaggcatatcttttaaaaactaaaaaagtcaaagagggtgagagaagatggaaatgattacacataatccagatggatgaaaatattgagggatcattaacccaagtgacttttcacacattttggcaactcattaattttgcaataatctttttcagtgattttctattcagtccttttaacttccttcacaaacttatattaaaagaatgcaaacactctcctacaataaattaacaaacaccttgctatgacatctgtttctttattcaacaaatactatggtgtattatatgtaaatgtagctgtgataatctctatacatattaaaatraggatgatgtggtccatacaaggttagtaaataaagaactacataattattagtactatatatatgtagtgtgtatatatatgtatatacatatatagtgtgtgttcatgtgtgtatccataaccaaataactataaatcaaatagctctacaccaagaaaacagttccatatggctctggagtttagaagagaatataaaagctaggttaaaagttggaaaattgaccaggtgtggtggctcatgcctgtaatcccagcactttgggaggctgaggcggacaaatcatctgcagtcaggagttcgagaccagcctgatcaatatgatgaaaccccgtctctactaaaaacacaaaaattagccgagtgtggtggtatgcgcctgtaatcccagctactcaggaggctgaggcaggcagatcatctgagttcaggagttcgagaccagcctgtccaatatgataaaaccccatctctactaaaagtacaaaaattggccaggtgtggtggcatgtgcctataatcccagctactcagtaggctgagacaggagaatcacttgaacccgggaggtggatcacttgaacccgggaggtggaggttgcagtgagcactccagcctgagcaataagagtgaaactccatctcaaaaaaaaaaaaatggagaggtaataaatgaaatcaagagggagaaataaggttgctgtggaagaacatatatatactgagagatattaggataaaatactgggaaagacttttacttagtaaatagaataggagaaaggaaaatcaaagaaggaatagtcataagaacacaatgaaacaatacatgtatagtttaatgaaactctcaggaagaaatgtaaaaagaggagttggccagcaatgtcaaataacctagaaagctaggaagatgaagaccaaaaaaagacactaaattagtgacaaagagatcactggggctacctgagagtatttggaggagaatgtaaaaggatttgagtaaagtgagtgagaggtgaggaagtagaggcagagagtatagtgaaaggagagaaagcagggtggatttgagattttgtagaatcattggctayggggaaattgaacgcgcacaagagagggagtatttggtagagcaaaaccttagagaagatagaaggggttggaaccaagaagttaggtgtgtatagggcgggttctccaagaaccatggagaaggcagagataataggcaaagccaaattttgaagtgaacaggaagaaagttgaagaagctcgtgtctggattttcagagatcagggagggttcagcataggttctgaattgtagacaagtgatgagacagctgatgatgaaattttaatggataagaattcaagtgaagacagataggactgatggacatggaaaataaaactgtggaagtaaaggaaggagaacatgataaaatcaaagacttgtatcatataataataatgaggacatagccagaaggaagtttcaagttgcagatctgagagtgaaacttttttgaggaatgtgccatgagaaatccactataagatggtattrctttagaattcctcccaaaacatgcctgtgggatgaattaacaggaccttggttatatcacgacctagtcaatggcatgatcccagctgggaytgcctgtgctgttacagcaaatctctacctgtgacccagcatgaaagggaatttggaggccagggaaagtggctttaaattatgaggcttctttttcaacatttacagaaacaaccatcatttatatgtacatcaagcttaacttcatataaattgtgtatctagtcaaaagtatccaaggcaaaaatattcaatcttcaggcttttcatagacctagaactctttatgtgggcatataactgtactataaccttatacttttatttatttttagggcttgtagaaacaggagctattattggtcctttgattggacttttgttggcatcattctgtgcaaatgtttatgttgacactggatttgtgaacacaggtaattcaataaaatctatttgtacagtgtctagactatacaaagcatctcaggtatgttatcatatataatcatggccttacttgaccttcaatttgataaatgatctctactttaaaagtgagaaactctagtggaggaatttaaataacttttaaaatattccaaaccagaaagcagtagtgcaaaataaaatgctaatctgacacagaatcacatgctatttctagtgcacttcaactatatttcttggttttacaaaatttaagcatgtaggtttgaatttatttcaattaagcaatcatttgttgatgatgaaatagaactttaagcaatcatttgttgatgatgaaatagaacttgtagctgtttagttaatacctgcttttaaatcccttacatgatagacagataaccagcctaatttattactagacaatattacaacaccacatattattagaaaaattttatcagtgtctgaattataagccaattttatagttggttgggacccgataattctaattttaataattttctatagttcatacagaaaatactgacttaagctaataacagtgtgtgtatttttttacagatgatctgatcataactcccactgacactcgttgggtyggtgcatggtggtttggctttctgatttgtgcaggagttaaygtgctcactgccattccttttttctttttgcccaacacacttccaaaggaaggactagagactaatgctgacatcattaaaaatgaaaatgaagacaaacaaaaagaagaggtcaagaaggaaaaatatggaatcactaaaggcaaatatacatattctaaatactatgaaattgaccttttatttcatatagatatgtctgtattttagtctaacactatgatatgctatgctgtgttgagacaatttgtcatcaacagtcaccagtcaagaatacctaactagtccgattcttcctatggtactacttgaaaataaatattataatttggaagctgaaatatttcagatcagcatttgtgtaaacttttatgtcagtcttggcactctcctctctctctctctttcatatatatatacacacacatatatatgtacacacacatatatatatacacacatatatacacatatatatgtacacacacatatatctacacacatatatacacatatatatgtacacacacacatatatatatgagagagaggagagagagggtcatgtatatatatacacacacgtatatatatatatacacgtatatatatatacacacamgtatatatatatacacgtatatatatacacatatatgtgtgtgtatatgtgtgtgtgtatatatatacgtgtgtgtrkatatatatatatatatatwcacacrtatatatatggtcccatttgctcaaaaaaccgattttacagagaacataggttgaattgaaacaaaatgaacaagcaaatttaaactaagaacaaaagtaggaaaaagtatactctaatcttaataggtagtatagttttgtaaccagtgtgttagtttaacgaagagcttcctggaagttaaatcagaaagaaaaaaaaaaacatgatcggtgacccacctctctatacttggtagagggaagaataataatttttaaacagaagcagttctccaaggaagaaattgtaaaaaaatttaaaaatgatcataagatacatgatacaggtaatattgagccacatagtggttttccagcaaatgaaagggtaaattgcatgtaacattttttttggtacagaacctcaataaaagctcaaagtataatttacagaaggtttttctgtgggaaactaaactaagatagcctaagtatttagtactcaagagcactgatgctcaaacttggctgcacattggaatcacctaggaaattttaaaaatgattgatgcctgaaagttctgtagtattcccaaaaggtcagatttaattagtgtggatgtgcagcctggctattggaacttaaaaatgtttatttgacggatggtgagggtctcagttttctgtcaaatggggataataatagtacttactatagaattgttgtgtgaaggtaaaagacattctagcacacattattattaatactgatactagtgttagtacttttatgttgtcattgttgtttctatcatcacccataagttacaatgtcaatttgcatagaatttttcttaacaattgtaaattctcttaaatcataattgagcataatttaatacatctttggtcattaggagccaaytcagaatcttgcaaattctcagaatcattctgatgatattaaaaactcttcttaaaggattgttatggactgatagacctcttgcagtctgcaagatcagttccattttcaaaattaggaaagagcttagcttgttgcaagacatagaawagaaacttgtgctactgaaactcatctrttaggacagggatgtcaacaaacatgggtgacttaaaaatcttcagataactctctctcctgtcaggtaccctattcataaatataaattttacaattataactcatttacttgmattaatctgtgtgtcctcctcttctaaattgtttatttattgaaattttgttccagaatgaattgtgagcagtttattaagcaaaccaagattgtgcataagaaagtcaagacagagaacatgtggacaggaaaagtgaaaggaaattaaaagtgagaacttgagcctgaatggtagcagtgtgaccaagaacatttactagaagcaggccacacattactagaggcaggccacacattactagaagcaggccamacattactagaggcaggccacacatttggctctgtgctttttctaacaggaatcatttttgattamatcatttacatagtccttagaatgtaccaaatgaatcagcatctctgaggrtgggacctggatgttggtattttaaaaaatatctccaggtagatcttgctgagaaccaatggcagaaccactgaaactgttgttctgaagaagcaaaaaaraattccggatacttgagaacattcatatctcattaattcccacacatctttatttcaaatgttcagggagtgataaaataaatatttgtgtgaaatcttctttatcaactygattttcctccagactttacagaacagaacaagcatctttcattctaatgagctgtagaaaaaagaatatattaatagaagaacaaaaggttagtaataaaatgctgtggacgtagacaatattttggtcactttgtagttttgcttactgatctttaagactcaacagtgacttattgagggcaaaactgttgtgttctgatccctacccagtcagctayatcactgacttccagaagccaccaaaacattgctatgacttcagctttcaaggggaaaaaagaattagcaaacaatacatattacaaaatagtaaaaaacataatttgttgaggaggtggatgtttcaggaaaagccagtcacaaaatgcaaagccaagttcgtttgacacagttgtcattctttcatttcagattttctacctttcatgaaaagtctttcctgcaatccaatttatatgcttttcatacttgtaagtgtgatacagttcaatgcattcgttaacatgatctccttcatgcctaaatacctagaacagcaatatggaatatcatcttcagatgcaatctttctaatgggtatgtttgtttttctctgccttactagcacactttcccccccacgaacagtgtgatggcgggtgtagcaaactcctaagttgaagtsttttaggatattttttgactctggtggatttcttccttctaatctcaagaaagaaagaaagaaagagaaagaaagaaagaaagaaggaaggaaagaaggaaggaaagaaggaaagaaagaaagggtagggaagggaagaggtcagaaataccttgattttcttctctctgaagtcagaatgtgaattcataatatgaatgcaaatatttgggagtgcaaaaattacatattttcagataggattgtgcattttactaccaaattttactctttttggttccagttcaaggattctatgttcctcctaatttaattttttggtccccctagtggttttaggtgtctctgcagccacacacattcgrcttttcctgcaaccacactaacctcagtggttttagcctaacttgggtttttcctgggatctttccactgtttttaaaagtcaatatcccaggctacttgtatccacactacctaaagtgcttgtgaaagcttcaaatacctggggttccccctcagacacactgaatcagactctagggcgtggggctctggaatggatttttaacaagctctctcaataatatgattcggggagccagatgctcacattgtatagatggaacctagggctatcttctcctttttctattcttttttttcacttattgggaagggttcagagaggaagagccagtagcagcaagacatgaaatgtaaatacacttgacagcaacaggctcagcaaagtgactctctaaagtaccttgaactgggtgtggtggctcatgcctttaattccagcactttgggatgctgaggagtgaggatcacttgaggccaggagttcaagaccagcctggacaacatagcaagactttgtctctgcaatttttgtttttaaattagccaggtgtggtgktgtgcacctgtagtcccagctacttagagggctgaggtgggagcatctcttaagcccaggaagctgaggctccagtcagctatgatcatatcactgcactccagcctgggcaataaagcaagattctgtctctaaaaaaagaaaagaaaaagcactttgagaggagtctaattcttcacaaccaaagtgaggataggtaactgaaaaattgtatatatatattctcactacacagaatagagggtaataaatgaataaattactggccaattttgacttgccacttctacctggatcctaagaaaagagatttttatcatgatctctgcctataagaaattcacaagctactgcaatgagttaaatgaatgataatataataacaagagtctcccaaaatatacttccccattatgggggcatttcaaaatctccctgtgggtaatgtgtaactaagtggggataaaattaaatcattcttcttcactatgagttggacctaaatagttacttatataaggcatattacataaaagtgataacatatttgttccttyggtaagtcattttgtaaataatatttyatttgcatttataggtatttataacttacctccaatatgtattggatatataattggtggtttaattatgaagaagttcaagattactgtcaaacaagctgcccacataggatgttggttatccttacttgagtatcttctctattttttatcttttctcatgacttgtgaaaattcttcagttgttggaataaatacctcttatgaagggtatgttgttttctaatgaatgtgagaatctttcaacaaatggttaatatgatattttttacaatggcaatgcacgatcagatcattttcttattggagttaatgatagtaatccatgcttttcctgtatctttcctccatctgtcaatcaagccaatctatccaagctctaggcttattaatgaggttgggaacatatcacagggtgagtgaatttatgattgtatgtgcatgtgggtgtgtgtgcatgattgtctttgtgatatccgagtagacattatcctatgaaagaaactacctacagtttcaggttgtattaaaatatgttatccatatatcttatactcccataactgagtaaaactaagagttgattatacagtcaaaatggcctttatatgtttccccaatgggcttaagtttggcataactaaatcataatacatgataaattaattaatacataattcatatatttcatttatattgctatgtctaaaatattgaatcatttcatattttgtattttaaaggttatctgggttttactgaaatgttttccatagtgatgtacattaaaagaattcacctgtagggcgtattttgacaatcaagctatcagttaaaatgaaataaagaacatcctaaaatgttttttcaaaattatcaaggtttattagattgaaataatttcaaatgtaaaatagtaatataattttacatatgctatttgatttgagactcatgagcttcatctaagataagcattattatctccactttacagattaaattgagattcagagaaatttaatgataaaagcagttcatttcaaatctcttcaactacatcaatatagaaatggattttaaaattggaataaattttaaagattgcctccatctccaatgatgctgattcccagacagaatgtgtagaaagtcgcactgtgatctagtctgaatgcagtctctaaactgctatgcaagtgctctttcaatcatattacaagcactggtcactttttatattagtagaatgcacttctttaattcaaatacctatgtttctggagctaaatgtattatctatattacaaatggaactttcagatttttatcttcatgctagtcctgtcttgctatttgctacctaatggatgaatcacagagattagttcatcttcatctttcgagatctaatagtatgtgaaaacatgactccacatggtaggtgctcaattaatgcttgtttattgcctatatattcttctgagataaatcattgaaggagtggctatgtggtcatcaaagcaggtctcttttataccaaagctatagtaaacaggtcacacattgatgactggaaaatttctctttctattcatgggaggagaggaaatctaactggggattgagatgaaaagaagaaaaaaaggattgaatcctcttttaatatctatgrcattattttaaatcacttcagaattccacaagatttatatgtggaaaatgacatctttgctgattgcaatgtggattgcaactgtccatctaaaatatgggatcctgtgtgtggaaacaatggcttgtcrtatctgtcagcttgtcttgctggttgtgagacatccattggaacgggaataaacatggtaagacatcctatttgacagaacttttttgagttgcattggtacttcccaactatgaactgggcctatatttaataaaagtaaaattagtgtttcctcaaaaccatattactttttttgtatgtggaaaaataactctatgatggtcacttgattaccttttatttcccagatcttatgtgaaacctccatagcatctgaccagtgatctgaaatttccaagaagtttatattattactcaaataatttgggttstaaatactctggactaaaaaaattttatcattgaaataaagttggtggttttgatttcaattgtccagctaattgctttgctatatatatatacatatatatatacacacatatatatatttctgtgtatatgtatggatgtgctttctgtgtttttcacattctgacagttctttgagaatttagaattaggaatgttctcttgcctctaagatatcacaatataatataacatcaattgtaatattaatataacgttggttggtgatcaaagtaaactataaattttgattcttattaagacctggaaacatgtaacaattcaaaaaaggttgacaattctttttttgaaagaaactatttcttttcttttcttttttttgagayggagtctcactctgtcgcctaagctggagtgcagtggcatgatctcggctcactgcaacctccacctcccaggtataaacgattctcctgcctcagcctcctgagtagctaggatgacaggcacatgccaccatgcccgggtaatttttgtatttttagtagagacgggatttcaccatgttggtcaggctggtctcgaactcctgaccttgtgatccgcctgccttggccccccaaagtgctgggattacaggcgtaagccactgcgccctgctgaaataaactattcctttgaagcaaagctttatttgtaagcatctaaatatttcagttgagcactctgaaacagattttgtttgtccaatgtagtgttgtatcaaaacactgttttaaaaagtgtattagctgggcgcggtgtctcacacctaggaatcccagcactttggaaggcagagaccggtggatcatctgaggtcaggagttcgagaccagttggccaacatggtgaaatccatctctgctaaaaatacaaaatgtagctgggaatggtggcaggcgcctgtagtcccagctaccccagaggctagggcaggagaatcacttgaacctgggaggcagaggttgtagtgagccgagatcgcaccactgcactccagcctgggcgacagggtgagtctctgtttcaaaaaaataaataaataaataaaataataaaaaagtgtgtctttagggtaacttattagttattacaaatttactattcatatttagaaaaatataccgtttttctgaaatcacccttccagttttgttatatggtgtaatcttgagagacatcataatggagayggagtaaagggaacaagcagtctccatcttgatccaactggctgtgtagaaaatgtttaaaatttgtgttcaagatttttacttcttagtataatatgttattttttggcaggtgttccaaaattgcagctgtattcaaacatcaggaaattcatctgcagttcttgggctgtgcgacaaaggacctgactgttccttgatgctccagtacttcctaatcttgtcagcgatgagcagtttcatttattctttggctgccatacctggatatatggttctcttgaggtacaaaattattttctttatttatatttttttggggtcatttattaaggtagcttgttctaagaaagtcactcaggactcagtatctaagaactcagtgctctaaygtaccatttattaagggttttgtattaagcattgttkgatttcacaaaattttaaagttagcaatgcacatgttcatctgctggcatttcactcctattcctcgctayttttcttccttatttcttagagttaaatgagtggacctctcattttgtgacaaaagagacacatttatatcttagggtaggccgtataaaatggccattttgataggtaaagagtgggtgcctagcagccatttcctagggttcaacctataggacagcagtgcaaagctgtcagaagcccccatctcgctaaggtcacttgatctttctgagctccatttttctttaataataatgggcataataataaatacttggctctcttacaaggctactgtgagacatcaatgctgaaagactttctaaaactaggaaattgcagagccagttttcaaatttaggtatattaaataaatcttctttcaactacaccagtctttgtgcctagtaaacaatcctgaasataatttgcattttttctctctttttcttcttcttttggagctckaaagtagagttcagttaatcacaatgctcaagtcataacacattatcatcataggccagtgcaaggattctctcttattttacttcatttatttatttatttctattcaattccctacttccagtcaccatagctgctcacttaagtatgacagatagatgtcttaaatatgtatttcctttgtaaaatattagaattttttgtgtgcatctgtttttatattcacaacaatggtggtgtggtgttaagtcttgttccgattcataaggtagatgcatagataaattcaccagtcctatttagagtaatttttatatcatcactgcatgagagttagaattatctaactttgtgatgttgactaatccaatgggtgtaaaatactaatgatagctcattgatgtgtcaatatgtgatgtcctgatacactgagcttaagcatctcttcaaataactttgtagctaaaagttattcatgatgcttattcaatttattttacccactttactcattatatttcctgcatcytatgtttttcttgatgaatttgatgattactatgtaaattacagatattaatgtaatactgtttatatgatacaattatcttcacttagtctgtcttctttcttttaacttttacagtgccatttatgaaatgaaatcctaaattttgttgtactaaaatctaacaagtttcttaccttagtgtttgtgtatttggaagagaagtcacatttttaaaattgcttccacatttctaacttataaaaatattcccttaaattttattcccccctggctttcccgctttaccttttgcatagttttttaagccatctcaaatctatttttatatgtggtttaagggacatagatatccagtgttatttttctccgaataataaagttgttttccaaaatcatagtgtatataatacgtcctttttcctttgatttgtggtgccaccatctcaagtttttataattagtgagtctatttttcatccttattctgctccacagatttatttgcctgttcccataccagcgtcaccttgatttaattactttggccttgcaaatgttaatatctcatatggtaactttkcctcacccacctgccatcttcacttttcctttattctttcwttctcaaacttattttgctgtctgtggatctttatatcttcataagaattttgactgagtttgtgtagattccatagattacttggagaaaatctgacatcaaatatttttgaacatgtaatatcctgtcatttgcttaaatattcctttgtatccttaaagttcttaaaaatttttcataaaggtgatgtgccattagattgcttcttaagtactatatataaatatataaattatatatgcacatatatacatatayatgtctctatatgcacacacacatatgtacatacagccacacagatacatacacacacgcatacatacacacacacacactgagaaaaacaaacggtttctctattcaaacagaacacttctgatagccagatgtgtgtattattttcctacactgttcaattctgcaacaccaactgggtgttctactgttccatgcaattctagtgctatctgcatagactttgcatcagatggcaaaagttaaacggttcagtcctacaagactgcccccactttagatgtcaatcacaaaatcacaagtccagacaccctgggctgcttttttttttttttaccctgggcttctgactgacaaacgatgcattaaggttgatgcctccattttctagaatggttcacagaactcagggaagaaacacttttcttacatttactggtttattatgaaggttattataaaagacacaaatggaaaccagggtggagttggggtgtgccactctcctggcatgtggatatgtttaccaactcagaagctcatcaaatctcctagttcaagagcttttagggagcttgatcttcagcacacacatcccactccattctcctggaggtctgagtgtggggctgagaattccaatcttctaataacttggtctttctggtgaccagtcccaacatcagtctgggaggccaccctgtcgtctcattactatagactcaggtgtgatcaaaacaatctccttaagaatgacaaaatacattcctatcactcaggatgttccaagggaattctaagaactccaaggacacgtgtcagaagctagggacaaagaccaaatatatttctagtgatgccatacacacacacacacacacacacacacacacacacacacacagaatggtaccattaccatcacaaatgtacaatatacatatatatccatctacatgtaaatatttgtgattgcaaatatatagagatatgaatatgtatatgattttaaactgatttatatttgtattgattttaaatatatttaaatttatatttgtattgcttgtaaataattgtgattatcaatgtgattgtacatggtattttgtatgtatatgtatatatgtgtatcatttccccatatacaaatataaattttatatctagattataattacatagcatataattaaaattatacataaaataaatcagaagtaaaaattagatttaaaaaattaatcatatataaatatagtttttttaattttaaatttttatgggtatatagtaggtgtatatatttatgggttatgtgagatattctgatacaggcatgcagtgtgtaataaccatattagggtagatggggtatccattccctcaagcatttatcctttgtgttacaagcaattcatttatactcttttagttattttaaartgtacgagtaaattattttccactatagtcactctaatacactatcaaatagtaggtttaattcattctttccattttttcgtacctattaactatctctacttccccaccacacccaggctaccctttccagcctctggtaacaacccttctgctctctatctccatgagttcaattgctttcattttttcttttttttctcagatggagtctcattctgttgtccaggctggagtgcagtggcacaatcttggctcactgcaacctccgcctccctggctcaagcgatcctcctgcttcagcctcctgagtagcggggactacaggcatgcaccaccacacccactaatttttgtatttttagtagaaacagtgttttattatgttggcccggctggtcttgaagtcctgatctcagatgatccatctgctttggcctcccaaagtgctgggattacaggcatgagctatcgtgcccagcctgttctcatttttagctcccacaagtaagtgaggacatgcaaagtttgtcttttggtgcctgccctactttacttaacgttatgacctccagttccattcatgttgttgcaaatgaaagggtctcattctttttttttttttttttttattatactttaagttttagggtacatgtgcacattgtgcaggttagttacatatgtatacatgtgccatgctggtgcgctgcacccactaactcgtcatctagcattaggtatatctcccaatgctatccctcccccctccccccaccccaccacagtccccagagtgtgatattccccttcctgtgtccatgtgatctcattgttcaattcccacctatgagtgagaatatgcggtgtttggttttttgttcttgcgatagtttactgagaatgatggtttccagtttcatccatgtccctacaaaggacatgaactcatcattttttatggctgcatagtattccatggtgtatatgtgccacattttcttaatccagtctatcattgttgaacatttgggttggttccaagtctttgctattgtgaatagagccgcaataaacatacgtgtgcatgtgtctttatagcagcatgatttatagtcgtttgggtatatacccagtaatgggatggctgggtcaaatggtatttctagttctagatccctgaggaatcgccacactgacttccacaatggttgaactagtttacagtcccaccaacagtgtaaaagtgttcctatttctccacatcctctccagcacctgttgtttcctgactttttaatgattgccattctaactggtgtgagatgatatctcatagtggttttgatttgcatttctctgatggccagtgatgatgagcaatttttcatgtgttttttggctgcataaatgtcttcttttgagaagtgtctgttcatgtcctttgcccactttttgatggggttgtttgtttttttcttgtaaatttgtttgagttcattgtagattctggatattagccctttgtcagatgagtaggttgtgaaaattttctcccattttgtaggttgcctgttcactctgatggtagtttcttttgctgtgcagaagctctttagtttaattagatcccatttgtcaattttggcttttgttgccattgcttttggtgttttggacatgaagtccttgcccacacctatgtcctgaatggtaatgcctaggttttcttctagggtttttatggttttaagtctaatgtttaaatctttaatccatcttgaattgatttttgtataaggtgtaaggaagggatccagtttcagctttctacatatggctagccagttttcccagcaccatttattaaatagggaatcctttccccattgcttgtttttctcaggtttgtcaaagatcagatagttgtaggtatgcggcgttatttctgagggctctgttctgttccattgatctatatctctgttttggtaccagtaccgtgctgttttggttactgtagccttgtagtatagtttgaagtcaggtagtgtgatgcctccagctttgttcttttggcttaggattgacttggcgatgcgggctcttttttggttccatatgaactttaaagtagttttttccaattctgtgaagaaagtcattggtagcttgatggggatggcattgaatctgtaaattaccttgggcagtatggccattttcacgatattgattcttcctacccatgagcatggaatgttcttccatttgtttgtatcctcttttatttccttgagcagtggtttgtagttctcctcaaagaggtccttcacatcccttgtaagttggattcctaggtattttattctctttgaagcaattgtgaatgggagttcactcatgatttggctctctgtttgtctgttgttggtgtataagaatgcttgtgatttttgtacattgattttgtatcctgagactttgctgaagttgcttatcagcttaaggagattttgggctgagacaatggggttttctagataaacaatcatgtcatctgcaaacagggacaatttgacttcctcttttcctaattgaataccttttatttccttctcctgcctgattgccctggccagaacttccgacactatattgaataggagtggtgagagagggcatccctgtcttgtgccagttttcaaagggaatgcttccagtttttgcccattcagtatgatattggctgtgggtctgtcatagacagctcttattattttgaaatacgtcccatcaatacctaatttattgagagtttttagcatgaaggattggtgcattttgtcaaaggctttttctgcatctattgagataatcatgtggtttttgtctttggctctgtttatatgctggattacatttattgatttgcgtatattgaaccagccttgcatcccagggatgaagcccacttgatcatggtggataagctttttgatgtgctgctggattcggtttgccagtattttattgaggatttttgcatcaatgttcatcaaggatattggtctaaaattctcttttttggttgtgtctctgcccggctttggtatcagaatgatgctggcctcataaaatgagttagggaggattccctctttttctattgattggaatagtttcagaaggaatggtaccagttcctccttgtacctctggtagaattcggctgtgaatccatctggtcctggactcttttttgttggtaaactattgattattgccacaatttcagctcctgttattggtctattcagagattcaacttcttccttgtttagtcttgggagagtgtatgtgtcaaggaatgtatccatttcttctagattttctagttttatttgtgtagaggtgtttgtagtattctctgatggtagtttgtatttctgtgggatcggtggtgatatcccctttatcattttttattgtgtctatttgattcttctctctttttttctttattagtcttgctagtggtctatcaattttgttgatcctttcaaaaaaccagctcctggattcattaattttttgaagggttttttatgtctctatttccttcagttctgctctgattttagttatttcttgccttctgctagcttttgaatgtgtttgctcttgcttttctagttcttttaattgtgatgttagggtgtcaattttggatctttcctgctttctcttgtgggcatttagtgctataaatttccctctacacactgctttgaatgcgtcccagagattctggtatgttgtgtctttgttctcgttggtttcaaagaacatctttatttctgccttcatttcgttatgtacccagtagtcattcaggagcaggttgttcagtttccatgtagttgagcggttttgagtgagattmttaatcctgagttctagtttgattgcactgtggtctgagagatagtttgttataatttctgttcttttacatttgctgaggagagttttacttcccagtatgtggtcaattttggaataggtgtggtgtggtgctgaaaaaaatgtatattctgttgatttggggtggagrrttctgtagatgtctattaggttcgcttggtgcagagctgagttcaattcctgggtatccttgttaactttctgtctcattgatctgtctaatgttgacagtggggtgttaaagtctcccatcagtattggcctgcgcccactgtctggcactccctagtgagataaacccggtacctcagatggaaatgcagaaatcacccgtcttctgcatcgctcacrctgggagctgtrgaccggagctgttcctatttggccatcttggctcctccccctcattcttttttttatggctgaatattactccatcctgtatatgtaccacattttctttatccattcatctattgctggacacttaggttgcttccaaatcttgactattgtgaatagtgctgcaataaacatgggagtgcagatatctcttcgatacactgacttcctttcttttgggtatatattaatacctagaagtgggattgctggatcatatggtagctctattttgagttttttgaggaacctccaaactgttctgcatagtagttgtacttatttacattcccaccaacagtgtaggagggttccctttactctacatactcaccagtatttgttattgcctgtttttgtataaaagtcattttagctggggtgagatgatatctcattgcagttttgatttgcattcctctcttgatcattgatgctgagcaccttttcataaaattgccatttgtatttattcttctgagaaatgtctcaaattttgctcatttgttaattggattattagattttttttctatagagttgtttgagctccttacatattctggttattaatcccttgtcagatgggtagcttgcaaataatttctctcattctgtgagttgtctcttcatcttgttgtttcctttgctgtgcagaagcttcttaacttgatgtgatcccatttatccatttttttttcattagttatctgtgcctgtggtgtattactcaagaaatctttgttcagtccaatgtcctggagagtttcctgaatgttttcttgcagtagtttgttagttggaggtcttagatttaagtctttcatcgattttgattgatttttgaatatggcaagaaatatgggtctagtttcactcttctgcttatggaaattccattttccctgcaccrtttattgaagagactgtcttttccccaatgtacattcttggcatctttgtcaaaaatgagttcaccatagatgaatggattttttttcagagttctctattctgctccattggtctatgtgtctgtttttatgccagtaccatgctgttttggttactataggtctgtgatataaattgaagtcaagtaatgtgattcctccagttttgttctttttgctttggataactttggctatcctggatcttttgtggttccatattaggattaccttttctatttctgtggggaatgtcattggtttattgatagaaatagcatcaaatctgtagattgcagattcctttgtttggttttagcaatattgtttctttcaatttatgagcatataatatattttcatttatttgtatcctcttcaatttcttgcaccaatgttttacagtttttattgtagagatctttcacttctttagggtaattcttagtgattttattgcatttgtagctattgtaaatagaattacttttttttagactgtttgctgttggcatatacaaacactactgattttttatgttgattttgtatcctgcaactttactgaatttgtttatcattttgaatggctttttggtggagtctttaggcttttcaaaatagaagatcatatcatctatgaacaatgataatttgacttcttaatttcaagtttggatgctctttgtttatatttcttgtctgattgctctagctcagacttctagcagtatcttgaataacaatggtgaaagtgggcatccttgttatgtcccagattacagaataagggctttcagtttttccccactcagtatgatacttactataggtctctcatatatggcctttattatgttgagccatgttccttttatacccagttttttgagagtttttttttttaccataaagcgatgctgaatcttatcaaatgttttttccacattaattgaaatgatcatatggttttattcgtttgttcttttggtatgatgtatcatatagattgatttgcatatgttgaactattcttgcatctctgggataaatcccrtttggtcatgatgaatgatcttcttaatgtgttgttgaatttggtttratagtattttgttgaggatttttgcatcagtattcatcagtgatattagcctttagttttccttttttttttttttcttatgtgtctttttctggttttggtatcaggataatactggcctcatagaatgagtttggaaggcttctctcctcttctgtttttcagaatagtttgagtatattgatattatttcctttttaaatgtttggtagaattaggcagtgaagccattgggtcatttctttgctggagactttattacagcttcaatctcattactttttattgatctgttcaggttttggatttcttcatagtttaatcttgatgggttgtatgtgtctaggatttcatccatttcttctaggttttccaagttattggcatatagttgttcataatagccttgagtttaacatagtttaacaataatgtcttaaaatcctttggatgtctgtggtatcagttgtaatgttttctttttcatatatgattttatttatttgagtcttctctcttttttcctagttattttggctaaagggtcatcagttttgtttttcttttcaaataactatttcttttgttttgttgatcttttgtattgttttcttcatttcaatttcatttatttctactccgatctttattatttcttttcttctactaattttgtgtttggtttgctcttgcttttctaattctttaatatgcattattggttttttttcttttcttttttttttgagacggagtctcactctgtcgctcaagttagagtgcagtggcgcgatcttggctcactgcaacctctgcctcctggktttaagcaattcttctgcctcagcctcctgagaagttgggactacagtctcacaccaccacacccagctaatttttgtatttttagtagagacgggatttcaccatgttggccaagatggtcttgatctcctgaccttgtgatccacccacctcagcctcccaaagtgctgggattacaggtgtgagccaccacgcctggcccattgggttgtttatttgaagtttttcttcttttttgatgtaggcatttatagttataaacttccttcttagtactgctttcactgtatcccatgagttttggtatgttgtgtttctgttattatttgttttaagaaatttttaaattttcttcttaattttctcattgacccactggtcattcaggagcatattgctcaatttccacgtgtttgtatagttttcaaatttcctcttgttattgatttgtagttttatttccttatggtcagagaagatacttgatattatttcaattttttttggatgttttaagacttggtttgtgagctaacatatggtctatccttgagaatgatccatgtgctggattcatatttgtattctgtagccattggataaaatgttctgtaagtatttattaggttcatttggtttataatttggatgaaatccaatgtttctttgttkatttwtttwtttttttttttggtctggaagatctgtccaatgctgaaagtgaggtgtgaattcttcagctattattgtattaggctctatctctctctttagctataataatatttgctttatatatctgggtgcttcaatgttgggtgaatacatatttataacttttatgtcctcttgcttaattaatccttttatccttatataatgatcttcttcgtctcttcttacagtttttttcttaaaatctattttgtctgatataagtaatgctactcctgctcttttttggtttctattggcatggaatatctttttcatccctttattttctgtgtctgtctttatgagtgacatatgtttctagtagacaacagattattgggtatttttttaaatccattcagctactttatgtcattgtattggagagcttagtctatttacattaaataatcttattcgtaagaaaggtcttactgctgccattttgttatttgttttctggttttctcttcctttttttcttcctttcagtgaaggtgattatctctagtggtatgctttaatttcttgcttttttattttttgtgtatccattgtatgttttttgatttgaggttaccatgaggcttgcaaatgctatcttatagcccatttttttaggtgataatatgttaaaattgcttgcataaagaaactaataagcaaaaagaaaactaaaaaaaaaactctacattttaactttgtcctcctaatttttaacattttgttatttctatttccattttattttactgtctgtgtcttgaaaagttgttaatatttttgattggttcatcttttagtcttcctagttaagagtagtttatacatcacagttacagtgttataatattctgcatttttttgcttacttactatttccagtgatctttgtaccttcagatgaattctcattgctcatcaacatcctttcctttctgattgaagtactccctttagcatttcttatagcatgggctggtattgatgaaatccctcagtgtttgcttgtctgggaaaatctttatttcttctttatgtttggaggatattttcaccagatataaaggtaaaagtttttttccttcagcactttaartatgtcatgccactctctcttggcctgtaaggtttccaccgaaaagtctgctgccagttgtattggcgctccattgtatgttagtcacttcgtttctcttgctgcttttagaattgtttatttatacatgaccttgcggggtttattgaattccttgaggtaatctttgggttaaatctgcttggtattctataaccttcttgcacttggaatcaatacctttctctaggtttgggaagttctctgctattatccctttgaataatctttctactcttatctctttctctaccttttctttaaggcaaatagctcttagatttgccctttagagactattttgtagatcgtgtaggtgcacttcacttttttttattctttttttcttttgtatcccttactgtgtattttcaaacagcctatcttcaagctcactaaatctctcttctgcttgataaattctgctattaagagattctgaggcattctttagtwtgtcattgcatttttttaactgtagaatttctgcttgattctttttatttatgtcaacctctttgtaaaattcatctaatagtgttctgcattttttctctgtattatcttgaatttctttgagtttcctcaaaatagccattttgaattctccatctgaaaagtcacatatctctctttctccaggattggtccctgctgccttgtttagttcctttggtgaggtcatgttttcctgtatgttctttatgcttgtcaatgtttgttgatgtctgggcattgaagagttaggcatttattgtagtcttcacagtctgggtttgtttgtgccatccttcttgagcaggctttccaggtattcaaaaggacttgggcccgcaagcccaataatgctgtggttcatgtagactcacagagttaccactttggaggtcttggataagatccaaaagaattctctggattaccaggcagagattcttgttcttttgccttaatttcttccaaacaagtggagtctctctgtgctaagttgcccagaagtgggggtagggtgatgcacccctgtggccaccaccactgggactgtgctgggttagattggaatccagcacagcactagtctcacccaaggcccactgttacctctacctggctgccacctatgtttgttcaagacccaactctacaatcatccagtggtaatccagccatgtttttgtctttcccttcagagctgtgagttttcccagtccccaggaaggtccagagatgccatccaggagcctgggatgggtaaaaaatcatacaaatctaccttatgctctatgctagtgtggctgaggtggcactcagactatgagaaacacctttttactcttctctcccctttccaaagtcagaggagccccaccccatggccaccaccaccaccacaggcccacagggaatactgccaggccaccactgacgtttacttaaggcacaagagttctttagccagcctgtgtgaatgctgctasgccaggactcacccttcagggcagttagctctcctctggcccaggagggcaggttcagaaatgccatccaagacccaaggcccagaatctggaactgcaaaaacatgcttggtgctctacccctggggtccctacccacactgggccacagaatattaccagaccctggcctggtaggaatctggcctcacagcaggagggagcagcgagcattaccccctgagttctgcctcctgtcagatcagctgtagcattagattctcataggagcgtgaaccctattgtgaactgcacatgtgagggatctaggctgctcactccttatgggaatctaactaatgcctgatgatctgaggtggaatattttcatccaaaatcatccccaactcctgcctggtcagtggaaaaattgtgttccatgaaaccagtccctggtgcaaaatgtttgggaaccgctgctctaccccattgtggctgagctgttacctaagatgcaagacagaattccctttgcttcctgtgcctgtgcttttctcaaacagagagtctctcaccacagctgccacagctctgaatgtgctgagtctcatctcaatacagcacacctgagtctcacctggggcccataacatactacctgcgtatagctgttggttattcaggccccaagggctctttagccagcatgtgatgtatcctgccagtactgagtccttctcttcaagacagcaggttcccttctgatccagggtatgtctagaaatgccagccaggagctagggcctggaatgggcacctcatgacccttaccagtgccctatcctactgtggctgagctggtatcacagatgcaagacaaagtcctctttactcatttctcccctctcctcaagtagaaggaaggaatctcttttggagccacaagctgtgctgcctgggcttgggtgaagggtggcacaagcacttccttagcttccctggctggtgtctcagtagggaagtgactcccaagtccattggctctgagcscagctcagcactagaacttgcctaggagttgtagtccttgcaacctagactgcctttcaagtttatttagggaragcacgtttgcccatggtggcgaggcttgctggaactcaagttctaactgtggggctgggtgattactttctggtgatagctagtctaaatgctccctccatgggtaagaatcagctgagtttagcttggttttgctttccactgtgacagggcagcacaggatttaataaagtctcagaatcactgcattctccctctcccaagtgctcagattccttctccatgccatgtggccactgctgggggatgggagggctggtgttggcaattcaagaccatttttcctgctctcttcagtgcctctttctgtgatatgaagttaaaaccaggtattgtgagtgctcacctgatttttcattcttacaaaggttttttttkktttttttttgtatgtagatagttgttaaatttggtgttccttcaggagggatgattggtggagacttctatttagctccttgctctacccctcccttataaattattgcactattttggacagataggtctgtstgtgtgtgtgtgtgtgtgtgtgtgtgtgtgtgtccatatttatctctatcatctctacgcataagtagagataggtatatatgtatatgtgtggtactgttctcttatattttctagttggttattgctggtttagaggaatgctgctgtttttaaaaatttactttttatacagcatcctttcttatttgttctcataatttgttgattttgttaggttttctatgtaggtttttcaatgtgcaaatatgacaagttttgtcttttcacttccaaaccttacacmtctgagacttctaaaattctcttatagcataaattaaaacctccaagatttatttaactgtagttgtgatagtgagtattcttgttcttttctaatcttagtaagaactatataaaatttatttattgttattcttactgcagatttttagtgtatctagtttctgtgttattaaaaacaattttttttttttgagatggagtgtagctctatcacccaggctggagtgcagtggcgcartttcagctcattgcaacctctgcctcccaggttcaagtgattctcctgcctcagcctcccaggtagctgggattacaggcacccaccaccacacccagctaattttttgtatttttagtagagacagggtttcaccatgttgaccaggctggtctcgagctcctgacctcaggtgatccgtctgccttggcctcccagtgtgctgggattacaggrgtgagccactgcgcctgaccaataaaataggtattaataagaaaaagtgatgagtaaagtgccagtgaccagaaatgggctcctgtgtaggctgccagctggataataaagccctgaataaccaataagtgagcatgaaagtaaaattttgaatgttcattatgtgtgactagcttacaactggccttttcaagacaatatgatagttttaaatctttatttttcttttatttacaaacttrtttacttttcaggtgtatgaaatctgaagagaagtcccttggtgtgggattacatacattttgyacaagagtatttggtaaaaatagttattttttcccacatcctatcagaacaatattattmktattattttttattacactttaagttttagggtacatgtgcacaacgtgcaggtttgttacatatgtatacatgtgycatgttggtgtgctgcacccattaactcatcatttaacattaggtgaatctcctaatgctatccctccccccttcccccaccccacaacrggccgtggtgtgtgatgttccccttcctgtgtccatgtgcagaacaatattaaatactagataaacaaggtaatattatttcagaaaagcagtctagcaaatgtcccttctgtatgtaaaaagcacrttataaatatgagaatgcagcacacaaagagatagagaatctcttttacttgaaaaggccctgtctgaccttaattacactattctttgtttgaagatttgaaaataaaatgaaagaaaatgctctgcccaaataaaatgtacatataactggcccaaaacatttaagaaaatatataaagttcagaatctttaattcaatgttttactctactaataattatgttgcatttgaccataagattacttatcttttaataatttagaaactttacagtaaaagtaactcatcatttctaaaaataaaatttagaccattagatttatgttttgataaactttgcmgtacaaataaagaaaattgaartatttccaaataaatcaagtatcttaattcttgttgatagatttttctttccctgtcaattgtagctggcattcctgcacctatatattttggcgctttaatggattccacatgtttacactggggaactttgaaatgtggtgagtcaggggcatgcaggatatatgattccaccaccttcaggtaaagataataatttgtttaaaattgttttataagcatagactgtgcataacgcagcaccattcacacgtaactttttctttgtcaagtgaaaagaatacttttgtggttatttccagcagagatactgatgttatatctccattccttatttgcatactagaattgtattttcccattatttctcaagtgcttggtaaatataagcatacatggcttccctaaccttggctttcaaagtgttgttcgttaaattcttagcagtcaacacaatattgaaggtaatggttgtacactgatacctatccaatttatattgctctctaaaggctctcattttatcctgcatgatttcatcatctcacgagtctgaagcctcacttcctctcaccaccagtctctggtctccaaaatcatatattttctccctctttacattttgctgaaacaatcttcttcatgtctcctaatgccttctctttggtaaatacaaatctaattttgaataaaactctttgttatttctattttcatgttctttttcattcggaaatttgagttttgtttaaatttgaattaacttctcttgatggggcaataataaagctacttcattcaatataaaacaatttaccattgtttaaagcattctaagatattggtcttgatcagcaaaaggacacatatcaagaagtatggggagagcagacgcaggagattcatctctgcatctattcccctttcccccagagctccccaggagtgatgctgagggaagctcagctacatgctatgtatgcggtggatttctaccacagttgaggaaccccaagggtcactattgagggttggcctcatcctgctacttggattcttgttgatagtctcctgaattaaatggtgcttaagacacattaaacggacttggctccattctctgttagtcagaccaattagactggtcaatgaaatggtgtatccatgagaaaaatctaccagaagccaagatattctagaaataagggtaaatattgttggtagacaattctccatggatccctacatttctgcttttcttgttagcagggacactgagagcattttttctggactatattttcaaggatgttggaacagtaaatgaccttggaagatataaatagtgtctctctcaaggacagagggcaggtagcttgttgtccatgatgataagaaaatgtctccctttggggcaaagtttgggcagatttttttgaagcccatttaaaagaaagattgggatttcctaaactcaggactttctaactgcagcccaaattcactgtgtgtacaatgtttacctgggttctccctctgtctcaccactttgggacttggagggtaaggaaaatcaacttgaacatgaagcttgtgctgactgctgtgttgtgagtaaaaaaagtcctttgtccctgacctatgagtcttgtatcttctgttagcatccttgaaactgtggcaggctagcctgttagcttacaaatgaagtaaaatcttagactcttttacagttcttgagaacaaacttctgattacctttacattttcctaaaaatgtgaaaatgattaattagatttattccaaccaatagaaggggagaaaatgcagtagtggtaattcataagaaaaaaccccacacaaataagttaaaaaataagcctaagtggttttgcaaattggttaaacttgctggttaaaagatagtaatttttatattggacttttcaaaatttgaactaaatgttgtttgtaagagatagatagatcaaaaatataaaatgattgaagataaggttttgaaaagatctaccagacacatactaaatcaacttctgtagttatattaatgatttcaacaaaatataagtaagttaaagggaaaaaattaatagggttaaccagagatattacttaataataaaaggaaaacactataaaaatatagaaaaattatgaasctatgtaaatctatcaacataacctcaaatatacaaaacaaaaatttataaaattataagaataaatctacagaatggaaaatttcaatatacttgtcccacaaatgaatattaaatacagacaaaaatgagtgataatatagaatatttcaacttcaaattgtacaagagtaattgaatatacagataaatgtatattctgtataaacatatataatctgtatgaatctataatacatctatatctatttctacatgaatacatggataattgttaaccaaaatacgagcacctatgccactaaaaagttaaaaaaaagtattgataccacataaatcctgttttctgttcacaatgcaatggagatgaaagtctataataaaaaattcccaaaccccaaatgtttgaaaagtggaaaagaatgcagtcttaaattactcatggttaaaagaataaattatagtaaacataaataattagaactgtatgtcaatgaaagcactgaataagaaaacttgtgggatgaagctaagccaaccagtaatcaaagggatttttagagctttaaatgtataaatatatatacacatatgtatatatttgcatatgtacaaatatatgtatataaatatgtatataatatatacatataagtacatatatacatatttatttacatatgtatataaatgtatatttacatatgtatagctatattacatatgtaaatatacatatgcaayatatattcacatgtatatacacataggtatatatgtttatatacacataggtatatatgtttatatacacatatgtatataaagatgtatatatttatacatttaaaacataatatgtataaaaatatatacatatatacatttacacataaaaggctgaaaattaatgaactcagaatttagaaaaagaacaatgaaatatgtacaaatgacatagaacgacctgataaatgactcaaaaatttacatattgatatatttcctatctcaaataagaataattgaaacaatatatttttaaaattcaaaagggacttttcttgattaaaagacaatataaatatcatcctaaacatctggtttttcagaaattaaacagaaacataaagsagtaaacaaagctgaattcacaggctctatgtctcaaaatgagcagtggtttctgatatcagcttccaaggaagaataaggtacttctaagtcaagcgactaaattcagattcaatgctttaatccaattaatraggtaaaacaccttttacaggatttagtgttcctcaaaatgtgatattcactcagaacttcacaatgtgaccttatttgcaaatagagcatttacaagtagagtagttaagttaaatgtggttatactggattrccataggcttaaatccaatcactggtgtccatttttttctgaatcctagtamtgtttcataataaaagaaaattttagaagtagaaagataaaaatagatgaagaaattaataaatagactatataccatagagggaataagaaagtaaagagctatgtttttgtaaaggtgcaaagatattactaataacaatactgtggaaaggcaaataaagagaggaggcacaaataaaacatcattaaggatgaaaaagctaatataagtacagatattataacacttacatagggattttagatataacaatttagaaacatattaaatagatatttttctagacaattaattatatattaccagattttattataaatctatagaaacatgaatatttttatagttacttaaaaatgtaaaactttcaaaagtgctcatctcccaaggtaccaagttcagatatttttcaggaaagtctgaaaaaacctacaatgaaccaatgattcatttgtaaattatgcaagttattctcagaaacagaaaaagggaaaattttgtaattcatttcacaaagctagtactatcttaataatcacactggacaagttcagtacaagaaaaaaatttgtaggctaatcttatacatgcaaaaattctacataaaaattgataaattgaatctagtaatgtataaaaattacagtttattttaagcatgcaaggataggtcaatatcagaaaatctattggtgtaatagatgctattaacacaataaaggtagaaaactttgcatattcttccgactacaagcagaaaagttatttggttatattatgcacattcatgattaaaactttgagcaagctcacaatagaaaataacttccttaatctgatcaaggtcatctaaagaaactctcacaagagtatatattataattcatgatgattctttggaagcattcttactaaatactagaataaaactgctatcactaccagtattcattttgaggtgaagatcctactcaatgaaaaactagttagttataacaacaataataaaacattagaaaagatgaaaataaatttggattttctcagtgggaaaattaaaaaaacataaaatattttaacaaatactgaaattaataagagagtttagcaaagttgcttatataagatcagcatgcaaaaccatcagctgctgtttttatcagaataaaatacaaagatatacaaatttagtttgcactaaccacactatgtaatatttaatatgttttaacttttaaaaaaatagatacatctacctcggattgccggcagcactaagaggatcaagctttgttccagccttaatcatcttaattcttttgaggaagtgtcatctacctggtgaaaatgcctcttcaggaacagagcttatagagacaaaagtcaaagggaaggaaaatgagtgcaaagatatataccaaaagtccacggttttgaaagatgatgaattgaaaactaaattgtaatyktcctattatattacttttttcagaattagagaacatgctgtacaacttaattgttttaaaaatcagtagagatataatagataactttttcttgtctttaagaacctaaaaaamctcttaactcaaaataataaaatgttcactaatgatatttctaaggtatcagtgacacttgagttttcctaggagggacatcaataacagccccctaaagaagattcttagmgccagctttatttttatgttgaaacagcaatttcccttaattcatcgaagtaagggtgtacttcctacatctccttctactaatacttctaaaaattttctgttatgaaaacctatttaattccactaaatttgttctttgatattggaattattcagatgcctaaattctcattctgttatgtgaagatttaaatattttattcaagtttatcgcttccatgtgagagaagcctacatcttcttattctatttaggaatcgttctttaactcttcttattcattctaggcatgactcctatataatagattactcataaatataccctcctactttcaattttttcttttctttattactcatacatttgctcaatttgtacagaatactgacaaacttaagcaggttattaaacatcatgaggcaaagattgttggattttttttcagtaattcaaatccagtgactaaagtttttcttacaaacaagtgtctgaatcaaaggatgaaaggacaatattataaaaactccagttcttaaaggctgtttgtaatgtcagatattgtcaaagaaccactttctaagattcaggactctttagaccgatgtttatatcacccattgtgtcctaaggtagaacacaaacactaattttcccaaaataatcttagacaatagcttctgttatgaaacagaggttagtaaaggctaaggtacatattaaaagctaaatctacttatattattattttgtaaattatggataaaattaaaaattgaaggattttagacatagaagaggacttattgattaatatagggcttctggtaaaagagaatagaatgaacagacaaatacctgtttgtctactccttactctccttcctgttgaaatgacagtcaatatataagaatgacataaatccctaatggatgaagagaatggagtaaggaagggtgggagaagtgggtgtcaatacactatggttatttatgtgtactataaatggagtgagagtgtctgcagggatacaacagagtggaggaagctgaaatacagaatatacctagaaggagcctggaatggaagtgtgaaactgagttgccagttcaaagtgtgagttggtagctggacagaaagcaggccagttaactgaaggactttgtacagatgctttacaggttaatatgatttcctaaatgatcagatgcatcatatgaaaaaagaaagcaaatgagaagagaaaggctgtatagaacaggtttagggggaaggatgaaaagttaagtttcagtttcatgaagtttgagacttcaactctgggcatataaaaaataaccaaggttcaaaccaagactggctttgaaacaagagagaggaactaaaatcattggaaagggggagtttaactttgatgtaggtatgactgcagcagtgagatatcgtattaagatctgatgacatgaaatttggagccacttcctttgtggtgggaggaagtgaggagaatggcctggaaactaaaacaaggagaagagacttacctatattcacagagcagcaagaaaaagtaaacagccactgcatgagaaggtttcaggggaatcagattttgctgagtgtgcgatggtgaagagaatgctcatttctgaactggaatctgagctaaaaagaagcaaataggatatatatggaagttagacttatggaaattagaagaaggggaatgagagatagtttggaattctgtggctatttaggtgactgacataaatgggrgcagaggacataatgaggttagttcttacggattcaaggcagatagtgttggtgaaacagtgagtgtcaaaattaggcgaggtggtgactgggctccctgatgacctcttgtcgtggagcaaaactgaataagcaaaaacttactcaagctcctgaggcccattcatcatccctattgatagatttgaggtgatctgagaaagctgagtcttgctttgtggacaattcacccacttgaactccctcaatggagcatcataggcccagagagacatggctatggacttagtaccttggcatcacttttatcccctcatggaggagatggcattttactctgaaaacatagggttctcctttgacacttcttggtgggagaaagcaggtcagagaaagtgggtgttggagtgctttgggatccctcatgacctcttttgttggtatacatgaagcctgggagtttagttcttattctgagcacttgtactactctcatgagggtagagataatggcatagcggatagacatggagaagagaaacaagagaacaggtagtgagaagtcgagagtcagtaattttcttacttaatattgtggggatcttacttaatacataaagttaatgaaactagaaatagtggtttaatatattacttataattcaaaaattaacctatatttacagatgcttacacagtttctttgtgaatccacctatggttttattttaattaattttttattgcaaagcaatgaaatgttgctttgtggagccagatagcattacagcaggtaaatgggtttctgctagatctccacattattggggagatgctcgaagacctcagaatatacacacccttaaggttcaagggctggggttgagctctccataaggaacttttcctcctcccagaagggcgatcattgtgtatatagacatggagacagaaccagaatgacttctgtgggtggaaatagtgccatcagaatcatttattattatgaaataaatattatttatctacattgaaaaaatactactcctcctaaaatcattaacttttcctcagatgattttaagaaatttgagtaatagcacacgaagtggtaaagacccttagtctttctggtatattagaaaagccttttaatcagtctctggaaggacactagggattgcagctgaataaatatattaagaataacaaatcagttcaacaaggagtagagtctgaagtgggattttccgtggaaattctcttatgtctgtactaacaataagaaagacaagacaaagactaagtaattaaagaaaagctcgaaatgttttgtaaccaaaagcttgaaatgttatgtaaccagaatgttatgtaaccagagctgttagatcagatactggctgattcataggtgaacgtcctctttgtgggtcctctcatgcatccccattttcagaatgtaaataatttggctttgtagcccttccaaaaagggtactatcccacttctcctggcataaatcatacattgactgaacgttcaccatctaaaaatcactcatgctccttgaaccaaggtgattatcagagacagctcctggtagaagaggttgtagatgttaaaagagtatgatttctatataagaaaatatagaaattgacagaatggttcttatttactgggcctggagaattcctgttctggcattcttagatccctcaaatttattaccaaggggaaaaggaaaaagaggcaagtaggcagtagggtaagctgttgtttgcttgccaaggaactggagagtgcaggtttcaagacaccttgaggaaattctcctgagcccttagccaagagaagagagcagaaaatgcttttctgtagaatcccaagaggcataaaagaggatgagtaactgggtcctgtgccaagttcccaacccctaagccttcccaacatggagaaactacaccagtgtttaaaagtttctaggttggaggaacaaacttgagcatcaagggcagatgatttgttaacacagtcctgtgcagagggctccttcagaaggcatcccctgtgacccaaacacagtgagcaccttctactttctggccttatgccatcaatgcatccagctgcaatctatcctcaaacctggaatccatctcttgacttcccagccagaccaccttccatcccttcactgtgtcccaccctgcccagaatgcatgctgttctcccagagtctcatggaaataaggccttgcactgaaataggctgtgggaaacaaaaggataagcaggtctggaccagtctgtaatggtagcaggtgaaaacaacttatggaaaaacacatgaattcattaggaaataaggtgacagatccccagctgctgaagaactagaatgtctattacactcatacaattgatgttttattttaatacaccagagctaccacacaaaacttccttccatgtgaaaggctccagataaaattctgccatccctcctctcctcatgtcctcctgctcagacccaccttcatgcccctaaaccaatctgcatcatgcctgtttcagagagtcatgggaagatgggcagtgcctccattgtcaccattccccacacctctgcacacttctgccccttcccctctagacgccacaacttcacagtcttactgttgtaaatattcctgcacagttagtaatgatcaaatgatcctgtggtcagaggcctctttggcagtgtcttcttacccttaagaaaggtcatgaaatccagaaggggcaacctttccaggagagctttggagtcatttctgtgtgagacactattgcataatcctgtaagattgcttttatatttaaggaatgatgttacttaacaaatgaacaaaaaaaattgcaaataaattttttaacaatgtttacattggcttaatcatatcttctctcttccatgtcccttcctttctcctcttccctagaggtcacaaaaatatactccactttcagttatctaagttgtctcccctccttcaaaggggagaaaggctggagagaacatgggaaacatgaatccagtgataataacctcagtcagcaattaatctcatcatccagtttcttccaatgcaagggttaacaggaaaatggtcaaaggttgacaagaagaaagaattggaggaattaaatggttaattcaccaaatgtaaaatgcccccaaactggaaaagcactaaattagttttgaaggaagaacagaagggaggagtgagagaatataggaagaaagaaaggagaggagaaaataaaataagatataaactactttgaagattataaaaatgcaaggttttgtttctcttttttattgtaactcagatgaagcttccaaaaacaattatctatgtaaaaataatttgtcctagaggattctgggaggatagcagagtagggagcaccagaaatctgtcttcctacttagacaacaaattcattggcagattatgtcttatgtaactattttgaaactctggagcctactgaaggcttacaacttccaagggaaggcttagacataaattgaggttaattttggtcaatttcagccattagtagagtagcaactacccatcccccactgtcagttccatggcaggcagctgagcacttgttccaggagcagcttgcatgcagtgtgtgggggccagggtgggcaaaatcatcctgttcttcaaatttcaggtagctgttctcagaatgctggttgctgcttctaaccacaaagatgcaaacacataaatgggcagccattgtttttgcacctcccctcgttgttgcaatcccctccctcatcaattgaagtgatttccagaggatttaaagagccagcactactgttcccccttccattttttaaatttttctccctttgggagccagacattaaagactaagatatttaatagcaactctatatatagggaaaattagaaaggtactgcacatggccaggaaaagacacaagctcagaaaagaccagagatatcaagtttacactttatgctgatccctggcacagaggcagcatgtaagtattaaaaacaacaacagcaaaccctatggaaggggaaataactgatttatagttacaatatttttagattcaaatgtccagcttccaacaaaaagtcacaaggcatataaagaaacagaaaagcatggcctattcaaaggaagaaaataaatcaacaggagttgttcctagaaaagacctgatggtagatctactagacaaagactttaaaacaactctcttaaatatgctaaggaaagatgtggaggaagtcaaaaaaatcatgtgcaaacaaaatggaaatatcaacaaagaaatagaacacttgaaaagaaacatttctgaagctgaaaatacaacatctggaatgaaaaatatactagagggattcaaaggcaggttcaagtaggtagaagaatcagtacacttaaagacaggacaatggaaattattgagtctgaggaacagaagagtagaagattgagaaaaagtagagagatcctaatggacttgtgggacaccattcatcagaccaacatgcacattgtggaagtccaagaagga

SEQ ID NO: 8773 - DNA, 53331 bp, Homo sapiens
atccccgccaccaggatgatccagccactcacctgccacacagatgtcaaagtagtcaccaaactcacttcggatgtgcttcaccaggtccactgcgtagttgaagcctccctcctcctcttcccactggtcacctattgggtctgcagggttggtggaggtcatagtcactgggtctcacccaacctccagagaccctttctgttccctctacctagccccgacacccaggactgcgagtccctggaaggcagaaacttcatattatttaggtttggttcgtctctttctagcacttggtaagacagcaggagggaaaaaagcagcccaccagttcaatattcactgcatgctgaccctgtgctggcggtggagaataggagaccaccgctgcttctcaccgtgcctggaggattggagagcccttccctacttctacctgggcacgcctgccaccctctcccatcccacggccttggggctcctgcctcctgggagaattttctactcatctcaagtgaaggggtcttgtggtagggagcacgaggccataggatcccacccatcaggctccctcttcccactcttaggtggcctgacaacagcgggcaccagaggcctgaccggctattctcactcctggatactctgttactctgtgattgggccaagtgctgggtgcagccagcaatcgatgcagtggtgtaggcaaggcagagggttatcaggccgcgactgcattcctgacggaactcctatgtcgaggtcaagaggtggaagaggtggctgcctgtgtgtggtgcccaggatgactcactacccacaatgcctactgacactactggcggggatgggatcctgcggatcctcagcgtggggcccaggaagaagtaaaggaccatttcaggaaccaagttcaggctaccaagtggcctccgggaaagccagaacccagagtgtaggggagtgctggctccacacctcccygcagcgccatgatgttcttcaggcccagctgcttagctttgtgcagatggccygtgatctcctccaggcgctgacggcagcaggtcatgtgcaggatggtctccaggccacagtagttcacggykgtgctggcgatcatcatggaggaggtctccttgtctgagccagggtcacctgctgggtgccaggtcacgtctatgtagagggggccacctgctgccatccggtcaaacctgtagggggtttgtttctgaagagaggttccaggagaaataccatccgtcactgccttcccatggggcccgggagttagagaagcatcaatgaaggttggagacagaccaatcagcgttcatatcctggctttgctacttatagctgtgtgatcttgggtacattacttaatctctgtgagttctgtttccttatttataagacacggcagatagtagtacccacttcataataacactaggatgctgggcgtggtggctcacgcctgtaatcccagcacttcaggaggctgaagtgagtggatcacttgaggtcaggagttccagaccgcctggccaacatagtgaaacctcatctctactaaaaatacaaaaattagctgggtgtggtggtgggcacctgtaatcccagctacttgagaggctgaggcaggagaattgcttgagccaggaggcagaggttgcaatgagccaagatcacaccactgcactccagcctgggccacagaatgagactctgtctcaaaaaaaaaaagcaacaacaacaacaaaaaaccataacactaggagaatatgacggcagctggttccacagaacttagaacagtgcctggtgtacaaaccgaatactcagtatatgtgaggtgccgttataatcactattacagaggtaagacacaacaacagcgctatcattttgtgtgagagcagcacttcagacttttcacagcgcttgcctgtttattatctcaggtgagttaagacatcatgattgagagttaggggaatcctaactgtggcaagcacagcctcgctgtaggaacagttagaaagagggtcagcagactcactttctttcatgccaccccccaagccctgtgcagcagcttacagttatgcagaccaaggccaagttccgaaacgagactcaaaaaaaagcctggatgtgcacgagtacttgtgttacaagctatcaacggtgtatttaaacatccttgtgcatttaaacttcaaaaacttgggagtgacacgtgagacgtgcatacagtaaaaggcataaacttaaaaaaaaaactgcaattcatgaagtgctaatgtaattcagttggcatttctagagttcaagaagcataatccaaatttctaacttgctgaaaacaatctcactgctttgtgacttcctaaactgcactcgtgatccagcccccaagttccctcaaagaatacagtgtgagaatcaacatttttaacccattgaagagtgtgtctaaaataccttgacactgtggagggacttttacaggcaacagagaagttgcagatcagatgacccactctgccttctccttcctgccccctccggctgcttttttctgccgggttaaagggcagcccagcctcagggctgacagtttgctccccaggcaccaccactcccgcctcccaccttaaccttgcatgagttyaccttgagatgagattgacagctccctcagcagttygaggagggaagaattccagggagaaccacttgtcaccagattccaatygcsgcctcatcttctcccggagtctctcatgccgctcrgggtccaggcccggggtggaacatctcgaactatctttggagctctcactgccactgctggcactgccctccaagcaggggttgaggctgctgtttcctcwggcttcgttcaccatggctgggttcctactgcacagggtggggcagggagcatcagggggcaggcagccacacccccgacacatcaagacacctgagtggcaggttcaagccggaggcgctgtatttccacacaggaagaaggccaaaaaaggtgacactgccccctcccagtggctccatgctcctcagctatggctgtccgggccgcctcactcaaagccttgccctccgctgctgccaggctccttgcatgcaaggcagcccccacccggcactgcaacatgctcctcggtgacagctacctgatggaaggtggcacagaggacctcacgctgccgacctgcgaggcccatattcctagcgaggggcagtagtgcccagctgggaggaccctggcttttcgatggtccatctctgtcagctcaggcccagagtgcgtggggagggaacagaggcaccttccccagcgggtgtgttcaactgggcggagctgcgacaaaggaagaggcttgagctccagccagcacaagggggcgggggcaaggcttccaggcgaggagggagggctgaggctctagtaaggggaggcggatggaaggagggggactcaggggcagagactgcaggggttggtggagatgaggccaacaggcgttcagggataccagatcaccctccagagaaggaacagctcactctggctggctctgcctggaacatctgttacttgaaacagttcgtgcacaggatggaaggggtgagggcttgactatgcagccagatttctcctgaattcatgctactccaaaaagacmgtgttgtgggttagaacttgatgctggccatgttccaaaaatagccagacccaagttcagtaagggcacgaatttctcagaacaaaagctgccccatctgtgcttgccttgcaggctgctcttcttacacatcacagaattcaattcaaatcatcacagtgacccagctactgggaaggctgaggcagaaggattgcctgagcccaggagttcaaggccagcctgggcaacatagcgagactccatctcttaaaaaaacaaaaaacacacctgtaatcccagcactttgggaggccgaggtgggtggatcacctgaggccaggagtttgagaccagcctggccaacatggtgaaatcccgactctactaaaaatataaaaattagccaggtttggtggcgggcrcctgtaatcccagctactctggaggctgaggcaggagaatcgcttgaacccggaaggcagaggttgcagtgaaccaagattgtgccatagcactccagcctgggcgacaaaagcaaaactccatctcaaaaaaaaaaaacaaaaacaaaaaacagaaacaagtaatcagagccaccagggcacagacaggccaacagagggcatagggtcatctggcagtctggttaagaaaataagacaaacacttaaaaacaaacaaaacacttgcacagcaatgggcaaacacacagtagtgaatgggtgtgtggtgacatggcacaacagaggaaagcccaggtgaggttcatttctttcagactgtccaccactaaccctgtgtacctaaccatttggggtcttagactcttttgacaatctgattaaatgcactgctcccttcccctgaaatacacacacaggtgcacagactacacggggatacatccaaagacaaggagttgattccagactaagaaccctgggccaaagctttctccctctagggctgctctctttcattctgacctcaaactccagattctcagtggggatggctgtggggagtgaggaacgggggcgggggggaggagtaacagcaagagcagccagttggctttcctccagcgtttaagggcgcacctcgttaattgcttgctggaacagaacctagagtaggaggaagctgaaccacctgtaaaccctctgattttcaaagacttattgcattcctagtatatgccacgcatgtgccatatttgtaagccaactcccacgatttatccgttatcagctggactcccatagcaccctgggttgtaactgtgggtgaaaaggcctgtctcctttctctttccccagttccctgagacaggaccggtgtcctgcctggggtatccccagagtttggcacacggtgatagccaacattcactgagcgccaaagggccaggtgctgccactctctcaaaataagcctctgccacttactgaacaactagtctgcgccaagcactgggatactaagcctacgactcccagaaaggtcccggcggacccccgtgcgcagcgggacgcagtgggcgccagggaccgcagtgccccgggcccagcgctcttctccaggtgatcgccggggaggcaggtttaaaaggcaggagccggaagccgtctcggcgcccaggtggccgagaatccagtcaccaggtcactgagtcaccgatgggggcgaggacacgggcctgggccggtcagaggggcgggatcgtcacccctggctcaggggcccctccgtccaggcagggagccaaagtcagtcttcgcttgagggttggcggtcgctggaagtggtagccattgggagttacactaatcccgcgaagggtgcgcaagggaggcggcagccccccccaagaagagaggcaggccggcctccagcgctccccgcccacaagcacgtccttgcccccgggaggttgtttgccggctccaggatctccctcccggcgaccccggcctcgccgtcactcaccctccagtcccgggtgactcagaacgctcggccgccggccgcaccactgtggccgctgcaggggcggggaacgcagtgaaggggcgcggcgcaggtgtcaggttgctggagaggcgggcctacagggcggaaaccaccggcgcgggtgaccggaagccccgcccccaacatggccgtgcccacaggtctcgttggaggccgtgcctttatcgtcatgtgacgcgagtcctcgccccacccgtctgcagccactcctggtctcagtcccagagctcgagagggccacgtgaccgtcccggggccagtcacgtgaggcgcagatcctggctgggagggggttggtagaggggtccagagtggcagtaaaggaggaagatggcggggtgcagggggtctctgtgctgctgctgcaggtggtgctgctgctgcggtgagcgtgagacccgcacccccgaggagctggtaagaagccggcggagtcggcctggggagggggcggttgctaarggactgagagaggcgttgccgggggtggggccgggccaatctgggcccgcaggtggcagcgggtggggcctggggaccgcagccagggctctcgaagcgtctaccctgcttcacgtgcctaagtctggggtcttttctcataacccctcctggaatctgagggagaatccaggccagctccagtaaatcccacccatgtttccttttatttccatctgaaaagagtttggaatgaaacaagcgttttcagaatgagcttcctcacaggactttgtgcttatcatgctgctgttttagcttctccagtcctttctcactctatccctcaccctttctgggtcactgacagtccagcttccccctgcaaagcatcctgggaaaacttgagttgtgttcccagagttgacaagtcctttctgatttcagatacgtcacactgtcaaatggaacctgcatttttaccccccttttcagctggcgttggacatctttgaggtgtcctgaagaggagggtggttatttggagactatcagtggaaatgaagagctcagctgatggctgtagatcctcacccacatggtccctcaccccygaaaggttttttttgagggctggttcctatttgataatggctccagatgatttagaagctagccactgatttcagtaaatacttctgcctccttccactcctaaccactaaaaaaggctccctctgcggatctgtktttctagaccatccttggagaaacacaggaggaggaggatgagattcttccaaggaaagactatgaggtgagctcctttgatactgcttgggcaactaaagtagtgagtggcctggtcacttcaggccgaagcattatgattccaaccagagatgctctttgaccttctgtcccagggagtgagtgggtaagagaacttccttctaggaaagagactgtttagcaagcccttttctcaccttaaccccaaaacaaggtctggtgtttttacacgtttataaatctgtggcaccttaacctggatagagtatgtatttgccattaaactgtttgcttttacagcttacagagagacttagagtgaaaggcactggcaggcagtatgtgcccctaacaggtgtgtgcttataaactgttaaggaggccttgcttctcttctaggagagcttgcttttcagatattttcttgctcaagcagcttctctctgacatgttcttgattaagttccacctttcatgtatgggattcttagagtatgtgtttttagtaaagccaacactgctggggtgaaacaacatgcgtgactttttatcattaaattcttaaacgtaataaagaaggtagagaaaagcctataactccattcattaaaagatgactgttaacaccttactaagtatctttctacatccttacccatgcttttatatacatgatacatgctttttttaagtaacaaaaatgagattccactaaatcatctattttaacctgtcccactcaccccctttattatactttttgtatcattaggtaattttccacaaccttttcttttttttgacagagtctcactcttccataaattcttcatgctgtagaatttagtgtcagcgttaggatttgtagcacttttttgtttaacttttattatgaaggatttcaactatatgcaaaaacagaataatctgttgaaaccccttgtcctcatcacacagcttccacagtgatttagctcaagcccagtcttcttttgtctgtgctttcgttatccacttctcctttctcatattattattttttattgtatgtgtgtgtgtgtttgtgtgtgtgtgtgtgtgtgtgtgtgtgtgtgtgtgtgtgtgttttaaagtaaagacagtctccctatgttgcccaggctgttctcgaactccttgacaccagcgatcctcccatgtcagcctcccaaagttctgggattacagtcatgatctaccatacctggccgcccttcccatgttattttgaaagaaattctgtacatcatattatttcacccataattctatatgcatctctaatggataaggacttttaaaaagcataacccaatactattaccacatctaaaaaattaggaatttcttgatatcaaatatctactgtccagattttccagttttcttgtaaatgtcatatgtattttaactttatttgaattaggttccaaaagtccttttttatttgtttgataaatctgttaaatctcttttaatctgtagcttcttccttcatcttttttttttttttgtaagttatttgacaacataattaggacctgggattttctactgtctagattttgccatttggagccgtttgtatagtttaatatgctactctgatgggactgctttgaatgaaccaaaaagcactgtatccactgctgtgttttgttctatttctttttttttcttttttttaaatttgagatggagtctcactcttagtgcccaggttggagtgcaatggctcgatctcagctcactgcaacctccaccccaccctaggttcaagcggttcttctgccccagcctcccgagtagatgggattacaggcgcccaccaccatgcccggctaatttttgtatttttagtagagatagggtttcaccatgttggccaggctggtctcgaactcctgacctcaggtgatactgcttcggtctcccagagtgctgggattacaggtatgagccactatacctggccattttcttctgtttygtaagtatttgttttcttgtacatagttgagaagtttgcaggaattagtataagatactccatattgttctgtcaccttgcactccctcactgaaccctgttacatcatcctgactgtatcaccaggactgagactgtctcacagccttcatcctacttctaggagctcaccaaggcttccccattgacacccaggctccctcaccccttctactaaattgtacttacatttgtaatgtgcttgccttcagctgatatgcatattcatgtaaatttttgttgttsttgtcattgtttgagacagagtctcactctgtcgcccaggctggaatgcagtggtacggtctyggatcactgcgacctccacccccgcctctgagttcaagctgttctcctacctcagcctcccaagtagctgggactacatgcatacaccaccatgcctggctaagttttgtatttttagtagagatggggtttcaccatgttggtcaggctggtcttgaactcctgacctcaggtgatccacccacctcagcctcccaaagtactgggattacaagcgtgagccaccacgcgtggccatattcatgtacatttcatgggttaatgttcttttgatattggtcattgatatttctcaaccatcttcaagaatgagcttcttgagagcacttgctttgtgtaagaacaaattcaggcacttaaacagaaaagtctggattttatttattcaataaataaatcaacttgacacaaaaagtataataaagaggggagtgagtgggacaggttaaaatagttgatttagtggaatctcatttttgttatttaaaacacgtgttaaaagcatgtgtataaaaacgtgggtaaggatgtagaaggatatttagtaaggtattaatagtcatattttaatgaatggagttatagggttttctctaccttgatagtcagtcaactagaaaacccttctgttgaatatctttctaaaaagtgccccttcttcctgtctcaggaagagttcattgcacatatttgactctttrtttgataaatttagggtcttacaaaatgttagaatcccattttgacatccattctcattataggtggtttgaaaaatggtaactttctgtgagatgtgccattgcaaacaggaatgttttcatgcaggtcacacagtctatttatattgtacctttgaattagaaagaggcacactcagaacgtaagacttagaattaaaggcctcccccactggccatagcagcacccctagctcacaaccagttgaaggtggttttggtgtgaacactaagatgccccttcctggttgaattggggctggttcagcccccacctccctcccggccaggtgccattttgctcgtaaccccctgtaacagccctgcaagacacagataacattttatttttttaaaaagttgttagtcccctaaaccaaagagcaacatatactgcagaaataaaaagttartcatagcaaaggagaagtaacagtatctggttttaataatagctcatatattccattggtacatatttacaaagggccaaactcaactaatttatttaaaaaaaaaagaagcgtggcacagtggctcacgcctatatgctcagcactttgggaggccaaggcaggaggatcgcttaaagccaggagttcaagaccatcctgggcaataaagtgagactttgttcctacaaaaaaatttgttcaaaattagcagggggccgggtgcagtggcccacacctgttacccccacactttaggaggctgaggcaggtggatcacttgagcccaggacttcataccagcctgggcaacatggcgagactccatctcaacaacaaatacgaaaaaattaacgaggtgtggtggctaacctgtggtcccccctactcaggagatcgaagcaggtgaattgcttgagcccaggagacggaggttgcagagagctgtgatcacgccactgcactccagcctgggtgacagagcgagaccctgacaaaaaaaaaagggattctggtgttctagcgttgcggttgtttctaaatgcccttcttagcagttttattgcactataattggcatactattcagttcacccatgtagagtgtacaattcaatggggttttaaaaattagtatattcacagagttgtacaaccattcctacagtcaatttttttttttttttgagacggagtttcgctcttgttgcccaggcaagagtgcaatgttgtgatctcagctcactgcaacctctgcctcccgggttcaagtgattctcctgcctcagcctcccaagtagctgggattacaggcgtctgccaccacacccggctaattttgtatttttagtagagacgaggcttctccatgttggtcaggctggtcttgaactcctggcctcgggtgatccgcccgccttggcctcccaaagtgctgrgattacagacgtgagccactgcgcccagctaattcctacagtcaattttagaatattttcatcacctgagaggaaaccctgcactcattagcagccactgcctgttctccttgcccctgactccaggcaaccagtgatctcctttctgtctatttgcctattctagatatctaaaaaccttctaaatgtttacggaaccatatcattattagatggaaccatcaatgaagtacttgaccagtaatttccatacatattttggatgaaggcaagggtattgtttctcctctgctctcaggcaccactcgcggaacactgctaacaccgatatgtggaggttgtttccccactactcaggaggctgaggtgggaggatggcttaagcccaggagttggaggttgcagtgaaccgagattatgccactgcactccatgctgggtgacagagaaagaccccatctcaaaaaaaaaaagtagtaggttgtcacctgcatttctcagcagctggcagtgaattgaaggttcacaggactccctccttgagtttggttaacttgctagagcgggtcagaaaacacagaaatgctacttacatttgctagtttattaataaaggatatcataaaggatacagaagaacagccagatggagagattcaaggaacgtgggagggggcacggagctttcatgccctctccaggcacgctaccctccaggaacctccaaacggttcagctgtctggaagctctctgaaccttgtcattttggagttttatggaagcttttttatgcagtcatgattgattacatcaccagcccttggtgatcagcttaaccttcagcttcggtctcctccctggagggatgggtgtcccaccccgctaatcctgccttggtctttctggtgaccagccccttttctgaagccatctaagggcccccagccgccactcatctcattagcaaacaaaagataccacggctcaaaaaaaaaaaaagacaaagtatgtttgtgtgtgtgtgtgtgtgtgtgtgtgtgtgtgtgtgtgtgtgtgtgtgtattgttggggctcagaaaatgatacctggaaatatggtgctttgatatgctgaactctccaccctcacactttgtctctcccaaagcacaggatgaggctcttctctgccgttcccttatctacctagaaactggacctaccagagaggaacacagttgtctttgatccctttcctgaaatgtcattaaccagggaacattaaaactcatcttacagaggagactgaagaccaaacaacatacctagagcctggacaaactgtcccaaccgttgtttgttcactgtcccatacaatttccaaagagaatcattcacaagatgatatctgcttcccagatccattcattccccactaagaattatttcctcccacatccctatctccccttcccctgtgaagaagagtatagaagcgtctgtacctcgctggcattattgggtaatcattctgcagttcccctgtgcaatgcatgttaaataagtggatgcctttgctcccattaatctgccttttgtcggttcactttcagcagacctttagagagtgaaaggggaagcttttcctcttggccgctacaatacatatgtaggtgcatatatgtttaatcacttatggatgagtctagtttctaaaagtacttttttcatcactgtgtttcttttctgatcagtaaaaaagattttttttttttttttgagaccgagtctcactctgtcgcctaggctggagtgcagtagcacaatctcggctcactgcagcctctgcctcctgggttcaagcgattctcctgcctcagccaccctagtagctgggattacaagtgtgtgccaccacacccacctaatttgtgtatttttggtagagacggggtttcgccatgttggccgggctggtctcaaactcttggcctcaagtgatccacctatctcggcctcccaaactgctggaattacagacgtgagccatcacgcccagccgatcattttttaaaatataaaaaagcacaccatttgtgctatgagaatttcagacaacacccagaaacaaatatctccttaagcactacctcacggatgttttyccattatgaatgctgacktacaaataatcctaattttgtttaatcaaaaagggatattatacttttaattctccatcctgctttatttttattttttaattgcatcttgctcttttgctgaataatttttggagattttccatatctttctatatagacttaactataatcattttattggtgtatagtttactatatttggatgtataattgatttactcagtcacttgttggtactccaggactcataaaaaaagaatttggactaactctaggtagtcatatagatagaataaattgtcactcatcacatgtgtttggctgacttgaaactattgtctgggagtgtggctgccacccagccaatgtccagctgatgtgggtaggaacaggttgtgggaaggagagctgatggccgaccattatttttctttgttgccaaactgctgcgtcttttttttttttttttttgagagtgtctcactttgttgcccaggctggagtgcagtggcatgatcttggctggctcactgcaacctccgcctcctaggttcaagcagctctcctgccctagcctcccgagtagctgggattacaggcgtgctccaccactcccagctaacttgtatttttagtagagatggggtttcaccatcttgcctaggctggtctcgaacttctggcctcaagtgatcctcctgcctcagcctcccaaagtgctgggattacaggtgtgagccactgcacccagcccagactgctgcttctctaacaagacaactaaaatgatttcctttgaattgtttctctaaatgtctgtggcatacctgcaagttgcttgcaggatttctgtgttttgtgatgcatgttgtaaaggatgctgcttcagatgtagaagttttaggagccgagagccaagctgaatctgtgcctcttcctaacataaagtggaagttggccaggcgcagtggctcatgcctgtaatcccagcactttgggaggctgaggagggcggatcacgaggtcaggagatcgagaccatcctggctaacacggtgaaatcccgtctctactaaaaatacaaaaaaattagccgggcgtgttggcaggcgcctgtagtcccagctactcaggaggctgaggcaggagaatggtgtgaacccgggaggcggagcttgcagtgagctgagattgcgccactgcactccagcctgggcgacagagcgagactccgtctcaaaaaaaaaaaaaaaaagtggaagttgcttttaaaaatactttccatgttagtttgtcttgtgactaacctcatttccatagacactaactacaaaagataattataactaattgacattctaaattaatttggttctggctaactgaaacttttgttcatatctaatggagtaagtttcataaggctgatgatagctgaaggtctttaaatattttgccaaaacaggaagtttaaaaataggtaatttaaaacttctcctaaagcatgaagtatgaacctaaagcaacaccactcaaattttaatgtgcatctgagtcatctggggctgcagggctgcaggagtctaagattctgcattttgtttttgtgtttgtttttgaaacggagtctcgctgtgtcacccaggctggagtgcagtggtgcgatctcggctcaccacaacctccacctcccaggttccagtgattctcctgcctcagcctccaaagtagctgggactacaggtgcgcgccaccatgccyggctaattttgtatttttagtagagacagggtttcaccatgttggctagactggtcttgaactcctgacctcaggtgatccacctgccttgacctcccaaagtgctgggattataggcatgagccaccgcacccagccagattctgcattttgaaccagctcctcctgggtgctgcaggtaccactgctctgcccatccacacgttgagtagcaggaacccagaggtttgtccctttgcaggtcttctcacctgacatgaccttttgactcaactttgcctcttttcagagtttggattatgatcgctgtatcaatgacccttacctggaagttttggagaccatggataataaggtgggtcttacaattcttcatctctggggatcaaatcagtcttaacatggcattttttttctcttctaaaggccccagtaaacatctttacaccttgttttttgaaccttttcatgcgatacaggcagacctcactttatgcgctttgctttatttcacctcgcaggtactgcaggttttacaaactggaggttggtggcaaccctgtgttgagcaaggtgccatttttccaatagcatgcattttgtttgcattttttagccataaagtattttttaattaaggtaggtacatttttgtaggcataatgctattacacactttatagacctcagtatagtgtaaacatcacttttatatgcactgggtaaccaaaacactcgtgtgactcactttattgtgatatttgctttattgtggtggtctagaaccaaacccatgctatctgyaaggtaggcctatgttggcatttattccctaggcctttatcctgccaaccagagttccccctgtcagtgcaccttgcccagcctcttaagagtccatcatttttgcactgtaaagcacctgaaatcccaacatcatctttactgtgcctgctctccacgtggaatttagcttaaaactggttggccaagatgtatttcttcccctctgccaccataaccctgtaaactgaatcattcttttcctrtgtgaacagaaaggtcgaagatatgaggcrgtgaagtggatggtggtgtttgccattggagtctgcactggcctggtgaggaggcagggcctggagggatggtgggccatagggctggaggggcttacagggaaagccctggcctggtgaataacattgtcatttgtcattataacatttataacattataatgcaataacacttgtcattataatcaagagtgccttttcttttttcccttttttttttttaaatgaataatcctggcacagtttttcacacttcccctgcttttgctttgtgaaatgaaagcgagacacatgacaatggtgctcttgaagcgctcaaaggtttgggcaggactttatcttttatgatatgattatggatcataatctctaatctacctagtaaactagatgtctccctaatgggtagataatgcattgggtagagtaaataatggaagttaaagttacttttttttttcttttaatttaaatagagacagggtctcgctttgtcaccctggctggagcacagtggcgtaatcacagttcactgcagcctcgaccttctgggcttgggtgatcctcctacctcagcctcccgagtggttaggactctaggcaggcatgagatcgctctttagggaaaaagcgaagtcgtgggtacggaactgtgaacatcgtgcccttcatttagcacagcgtgccagtgaacagggtggcacaccatagctattgatctcatgcagggagtttatggtgctatcctgggctcctccccgtacgtcgttaatgttatctagaagatagagccagcagctgtgagtgaagggatatgcccgtatgaacagagttggtggaggcagcaacttcacaggtgaatcaaagacaaggcaagattggaaacatggccaaagatgaggatagcaaaaagtctggaaccaaaactgccgacttcacattgttaaatatgaggaagagaagctggaaaaatcagcatcagtcaaaaagatccatgtcaaatctgattccggtcagtacagtgttgggatagggtatctgtcctcagtaacagcctgttgaccacctttatcttgaactggccacaagcctcctacttaatttgacatgatatgcctagaaaatgtacacatgtgttcggtataatatagccacaggggccaaccacaatttttattttcatggcatgcatcaaatttttactatagtaaatccacaagtaaaggaacatcttactaggtaagactgatggcattcagaagccctcttcagtgatattctgatggataccattttggggaaacttgggttgatttattgttttatttaaatctcagggtgttgggccagggacggtggctcacacctgtaatcccagcattttgagaggccgagacaggaggactgcttgagcccaggagtttgagaccagcctgggcaacgtagggagaccctgtctccttaaaaataaaaaaaaaattaaaaaaaagaaatctcagggtatttattttgctatatatgtttctggttgcagatttctctataataagcatagtccttaggcctctagttgttagtgtttgtgctacttttatatcaaactctttggagctgccacttgtcagtactacaggttgagtgttccttatcagaaaatccaaaatgctccaaaatccaaaactttttgaatgctgacacgattctcaggaaatactcattggcgcattcagattttggatttcaaatttttggatttgggatgtttaatcagtataatgtagatattcgaaaaaaaaatctgaaatccaaaacacttctggtcccaagcatttcagataagtgttactcaagctgaagcaactttacctcctacctttgtattttaggaaggcacacctgcctttatgacatagcactcccaactctygtccattgatgtgtggccactttatggcttcagtatcaaaaagcctccaggcattggcttgagggaaggccagagttaaaggcaagaagctttgatcctgaatccataaaattagaagtctttctagttctcctttaagccctgagcactttggagagtggaatactggaatttggttgttttctctacccagagtaactatggactataagatggttataagtcaagcctggcacagtggggtgtgcctgtaatcccagctacctgggaggctgaggcaggaggatctcttaaaccctggagttcaaggccagcctaggcaatatagcaagaccccatctcaaaaaaagatgatttcaagtcaaaataatgacttacaaaatagaacctgctaataaggaacatgcaaaaagcacatacacctaaatgaatgttgtgttttaaagcaagcttgtccaacccatggcccaacacagattcatataccttttaaaaacatttatgagatttttctgagtttttcttttcttagctcatcagctrtcattagtgtattttatgtgtggccaaagacaattcttcttccagtgtggtccagggaagccaaaagagtagacacccctgtgtcagtagtctttcttggtctcrcatctttttctgcacctgcttccctctttgttttccgttgcttcactcaacttagctgtactctctgcctttgttctttggaggggcagtggractgggctggagaagggatctcctccttctgcgcttttctgctgtgcattcacgtactgctggctggtgagcagcctccgtatgtgcagtgggggaggagatgccttyaagaggagcacacctgtactatacttgtgctacacttggaaataaggctgtgtgacagatctcttgctcttcacaggtgggtctctttgtggacttttttgtgcgactcttcacccaactcaagttcrgagtggtacagacatgtatccttttcacggttcctggtgttcgtggacttcagtggtcaccaagattctttcttacatagaaatgggtytaacagtaagcatrgtattagaagggccgcttattagctattcagctttaatatttctaatgatcactgaaggacacaaaagaaggactttaataagcaaagacatatacctatgtttgtggttgataagattacagatgccgcaaagatgcctgtactccctaatctgtaaatttaatgtagttccaatcaaaattccaatagaatttgttgtggaactcagaaattctttgtaaatttgtgtagaagagtaaagggccaaaagcagtcagtatagttctaaatgacaagaaggtggacttgaccctgtcagatatcaagtcttataaaattaacaagtttggggagttagggaaaaaaaagtcataaaatttaagatacagtcattgaaattggtcatattggtgcaggaatacctagacagtggaaaatgatagagaagcagaagctggtcctcacatacatggaactttggtgaatgacagttaatattacaaatcagtgagggagtgatgaatgatttaataaaagacgctgtgttatttaataaataaaagatacacatctctgtagtcccagctacttaggaggtgagcccaggagtttgaggctgtaatgcaccatgactgtgcctgggcagcatagcaagaccctgtcttaaaaaaaatgatgctgggacatgggtgatccatatggaaaaatagttatattcctatttcatactataaataagataaattccagatgaagatgtaaatatgcagaacaaaacttcgggagactatatgttgtcaagagtggggaataatttcttaaaactccagaaggcacagactataagaaaaaacatcaatggggccggacacagtggctcacgcctgtaatcccagcattttgggaggcagaggcaggcggatcacaaggtcaggagattgagaccatcctggctaacacggtgaaaccccgtctctactaaaaatacaaaaaaattagctgggcgtggcggtgtgcgcctgtagtcccagatgctggggaggctgaggcaggagaatggcatgaacctgggaggcggagcttgcagtaagccaagatcacgccactgcactccagcctgggtgacagagcaagactccrtctcaaaaacaaacaaacaaaaacatcaatggctgggtgcagtggctcatgcctgtaatctcaggactttgggaggccgaggcaggcagatcacctgaggtcaggagttcaaggccagcctggctaacatgacaaaaccccatctctactaaaagtacaaaaaattagctgggcatggtggcgggtgcctgtaatcccagctacttggaaggctgaggtgggagaatcgcttgaacccgggagacagaggctgcagtgagccgagatcgcgccattgcactccagcctgggcaatgagagcaaaactgtctcaaaaaamaacaacaaaaaaaaaaaacaaacaaaatcaataaatttgaccacatcaaagtacatattgtatttataaagacaaaaactccaaataacaacaataaaacaccataaataaagtgaaaacaagtccacagcctgagagaggttatttactatgcatttaagaggcagataattagtatccasaatacaggaagaggctgggcgcggtggctgacgcctgtaatcccagcactttgggaggccgaggcaggcggatcacttgaggtcaggagttcaagaccagcctggccaacatggtgaaaccctgtctctactaaaaatacaaattgagctgagtgtggtggtgtgcacctttagtccagatacttgggaggcagaggcaggagaatcacttgaacccaggaggcggaggttgcagtgagccgagattgcaacactgtactccagcctgggtgacagaatgagactctgattcagaacaaataatacaggaagaactcctgcaactcaatcagaaaaacaacagatggtccaatggaaggaaaacgagcaaaggatgtgaactggaattctcaaaagagaaaaactggccagtaaacctctagaaaaaggaaggtgcacattcctgtgactcatacattcctcttagaaatttgaaccgtagacatgtacaaaggtggtaattatagctttatgatagcaaaaagctggagtcaccaaatgggagaatggaaaaattatggtacattcatatggtatcattttagacatcatgtcatttctgtagattgtaaaataaaaattttagacaagtgaaagtgaacgaaccacagagttgtgtgtatcaacatggctaattctcaaagacttaatgttgagaaaaaaagagcaagttacagaatatacaagtgccgtgtacaacagtgtggacacttttgaaatacacacaataatttcaggttagtggtttctcccaggggagagaggaaggaaaactgtttttttttttgttttgttttgtttcttaaaatggtactgaatgttttcttttttaaaaatacctggagcatatatggcatgttgttgagatttgttaaagctacagttgtgagggtatgggtattcgttactttttgtaatgtttgaagtatttcctaatgtcaaaggcatctcaaacaattttttcttttttttaagagatgaggcctcacactgttgcctaggctggaatgcagtggtgcaatgacagctcactgcagcctcagcctcccaggctcaagcgatcctcccacctcagcttcttgagtagctgggaccataggcatataccttttgtactttttgtagcracatggtctcactacattgcccaggctggcctccaactcttaggctcaagtgatcctcctgcctcagcctcccaaagtgttgggattacaggcatgagccattgcacccagtcatctcaggcagtttttaaaaaatttttatatakagagaaaaagtgcactcagcagccagcatgatccaaaggagaagcagctgcaccctctcaagtgatgacggggacacccctcggctgatgaacaagtttccttaacccagtttccgcagcggtggaggagtgcagccagaaaggctgcctcgctctgtctctccttgaactcctgggttttaacctcacctttgtcttcctggcaagcctccttgttctcattgaggtgaggtggtttggattcacctgctcgcttaggaggttttagagtcccgcaytccttttccccacctccttccagaatgtcaggaaactgagaatgcagattcctgcagaaagtggcctcttgttcactaaaggtaaaggtttcacctctggtgagattaaagaagaaaggcctcccaggtgatgctcattcacagggaacttgtacagattctggggggaggaaaaaagggggaaagggctgaaaacaaaactgttgggtgccatgcgcactacctgggtgacaggatcattcatgtcccaaacctcagcatcatgcaatataccctcgtaacatacctgtacatgcaatccctgaacctaaaataaaagtggaaattatttttctttaaaaagtgcaagtctggccactttgggaggccaaggcgggcagatcacctaagatcgggagtttgagaccattctgaccagtgtrgagaaacccygtctctagtaaaaatacaaaattagccggtaaaaatacaaaattagccgggcgtggtggcgcatgcctgtaatcccagctactcgggcgactgaggcaggggaattgctggaacccagaaggcggaggttgcaatgagtggagattgtgccattgcactccagcctgggcaacaagagtgaaactctayctcaaaaaaaaaaaagaaaaaaaagtgcaagtcctcccattgcccctcagacctcctgagtcagatcctctggagtggggcccagcagctgtggttcwgcaagccctccaggtgacgctcacgctgctaatgaaggtggccagctctccctcttccgccgcccagattgttgagggtaagccagagaaccaatggatttcgagttatgggtgtgcctgctctcctccatcagccggtggcagcaggttccgggatacccgaggtcaaatgctatctgaatggcgtaaaggtgccaggaatcgtccgtctccggaccctgctctgcaaggtccttggagtgctgttcagtgtggctggaggtaagaagggtccaacttgtatccttcaaatactcaaagggcagagacgacaagaagcatgatgtatttcagttattagatttggactgcagggcccagcctcaaacagctgatgtctgcactttttgttgatgggctgtttttaaatgcagacactgttcgtatgttaccattcagatacctgacaaacacactcttcagttttgggatttggaatttagcttgtggaattagcttttgtcaaaattagcaagctytttgtgtcaacagccagatagtaaatatttaaggctttgtgggccaagaatcagaatggaagctcttatgtagatgtttatgtaactatttacatgtgtgcatttaagaacgtaaaagccagtcttagttctcaggccgtgtaaaaccaggagggagctggtggtctgggctcacaggctctcatttgctgacacacaatttagaatgtagagtgttttctcttctagcaagacttgaaatggagcttatttggtgggaatttggctctttctcttataaagtcttaggatcatctctgttcagttgtcacgaggaaggtttttgtagccaaggtctcctgacccaggggcgtttctgcactgactgttggtctttcctttttcaccctgcccagggctcttcgtggrgaaggaaggccccatgatccacagtggttcggtggtgggagctggcctccctcaggtaagatgrgctgagagrgtgtgggcctctgggcaggcctagtgggaggtctggttacactgggccaaatccattgggacaccctgacatcacattggaacctggtgccattctggcttcacgtgtaaaccatgtgtctatctctcaggaaagggcataacttatacttggaagttttaatgatgccctaccgagccctaggagcaaaaatgagacatagagaaaaactgtgacgtggcggatgaaagtcactgggtgcttccatagccatcaccaggcgcctctatatagggtggctgggtggatcatctcagtgctgccagatccaagaggctcgaagcatcgactgacatggttttaggcacagttccgtgctgattctagttggcgtggtacagtcataataactgctgctaattatggtctgtgtgccagacgccatgtatactaactgctttctccttatagccaccttcaatgattcgttgttattattacccccatcctcagatggggaaactgaggcttagagaggttgaggtactagctcgagacctcaaagctcccattcttgggggctactccagatccctggctgctgttggagaagtctcagttccctgtgaactgtcactcttagtcatttccctctccagtcctgagaagagggagttattgtggttgggagtctctgaggtgaaggagggaagattctttcgtccagagctcgtcttttggtctctctcctgctactgccttgagcaccagatctggcagaagtgagccaaggggtggaaggccaggcgtggagtgggcatcagtgtgcacctttgtggggcagacagaggacaggctctgggcccttctcttcctggcgctgctgagcagagcagactcggtcttctgcaacagcttccgcgtccccttccctcagctcagccatttgcctttattctttcagacttgttgactctgcacaaaatgggatttcagaaggtcctagaaacacgagggcaggaaaaataagctcctcccaagggtggggggtaatctccttttttcccaagtttttttattttcattttttgagacggagtctcactctgttgcccaggctggagtgcgatggtgccatctctgctcactacagcctccgcctcctgggttcaagcgattctcctggctcagcctcctgagtagctgggattacaggcatatgtcaccacgcctggctaaattttgtatttttagtagagacagggttttgccacgttggccaggttggtctccaactcctgaccttaggtaatcagccgtccgcctcggcctcccaaagtggtgggattacaggcgtgagccatgagctaccacgcccagcctccttttttcccaagttgctgttctggactttccttcctgcagcacacttacccaggtgtgctcaagcagaggggcctcccctgatgccgtggattcccatagtttcagtcctaggctgcccctgacctgtgttcttttttttttttccataattactggggtacaggtagtatttggttatatgagtaggctctttagtggctctcttttctcttgctttagtttcagagcatctccttacggaagatccagtttaacttcccctatttccgaagcgacaggtatggaaaggttagaaattggtttcttttttggaaacaacatgttcatgcgctgcgggtcagactcgacacttgctctagcctggcagtatcccctgcggggaaacccgactgggagaagggggcgggctttgaacttttcttctggaaataagaagccaaagcaccaggctggcatcgtgacttttattttgtcatgccgtaaggcctagaagcatctcaggcaaatgaagatggtcccagattaaaaacccaaccaagaaaggccacagacaggcatattcttaggaaggcgttttgtattccccagtgattcacttggtcagccaccctcctgggtcagaaggtactcttagtagacttcttagccctgtatcagatgtgtgtgttactgacctgccggcctcgtaaggctctttcaatcagagactcagtttagagtcacggaccaccttctttttgtattcctgcaagttcggcacatacccagaaggcaccttgatgtttttactgatgccggggttttctggaaggaagatccrgtgggaacatggtgcagcagtgatcgtgccgatctttgatctgccccctgagctgggggctgagattctgagatcacagaaaacacagaggtcaggggctcctgttcccaggcagagtagccgccatgctgaaagggactctggtgctaaggtgtgtggctctcgggtggacacactcgcggcaaaggctgcctcaccagtgacctgcccttccaggatccctgcctattcattcacaggtgtgagaaaatgttcatgataaggaagtcagaaaccaccttttgggggctgggggctctttattggataacycgtctctctcctctcctcagagacaagagagactttgtatcagcaggagcggctgctggagttgctgcagctttcggggcgccaatcgggggtaccttgttcagtctagaggagggttcgtccttctggaaccaagggctcacgtggaaagtggtgaggaggaccttcagtgaaagcrttaaccacacccmccgaattacactgggtgtcccttactcggtacatggaatggtagttttgatgagactgrgggggtcractggatcagaaacagctttcctcttgtgcccataacctccacactggactttctgtacttctcatatcaataccctccctaaccccaaatcaaaccgctgttactttttttttttttttttttttttgagatggagtcttgctctgttgcccaggctggagggcagtgacgcgatctcggcttactgcagcctctgcctcctggattcaagcgattctcctgcctcagccttatgagtagctgggattataggcacgtgccaccgcatccagctaatttttgtatttttagtagagatggggcttctgacatcaggtgatccacccgccttggcttcccaaagtgttgggattacaggcgtgagccaccacgcctggccttgttatcctttcttgatgaaccacctgacatgaaaatgtgaaactggctgttgtcataaagcaggaagtgatggggcttggactggagccggtcttctccctcagagcaggctgtccttccctttgcattgatccttccttttggtgcaaggtctggtctgtaaaggctgtaaataggctctcatagtagagtaggctgctggaacggaaacttcttaaagcccaatctagagttggtcatacctggggtgtatctactgtaagggtgactagatctctgtacccggatgtagattcyggaggtctctgygtagagcagtgggtaccaggaggaagggttgggagagagtaggacatgccactcctgaaccttcttgtcttttgtcacctctcccctagctcttttgttccatgtctgccaccttcaccctcaacttcttccgttctgggattcagtttggaagctggggttccttccagctccctggattgctgaactttggcgagtttaaggtatgttttgtcctttccccaaggatttttaatttgacccatgaaaatttcctctcaagtgaaggaccagagagaaatgagcagagggctaggtacaacttccagggrcacatctcacccattagcctctgccgtgcgggaaagcagccccactcttgcttctgtcttctcttctgtctcttccggttctcatggctgctatggtttttctctccctctccctttccccttctctcagtgctctgactctgataaaaaatgtcatctctggacagctatggatttgggtttcttcgtcgtgatgggggtcattgggggcctcctgggagccacattcaactgtctgaacaagaggcttgcaaagtaccgtatgcgaaacgtgcacccgaaacctaagctcgtcaggtatctgcacagtcgcctcccccccgagcctgctgcggctccctgagcttggtgtgggccgcgccatctctcccgaggagcggaccctgcctccacggctttgatttctcatctaagactgagaatctaaacacggccatgcatcttccctacttgacaggccaaagggctgagccagcttaattgatgtcagagttgctggttgactccctgcctgtcctgacttggccactcggacacatgacaaggttagaagggtcaccgtggccctgccgagcagcttgctctcaggaggcttctcgccccaggacttattataatggaaagccattcattccttggagagagatgatgtggacgtagcagcccactttaactgtccactttttacaaacaaattgctggaatacagcaaatcacggatcaattctgcacacatgttgactgaccaggggctgctgtgaatgctgttyggagaaatcggggctgggggtaggcagggttatgttttgaatttctgagaccagagctkctttctgtggcrttgtaacagctgtgctttgcctcctagagtcttagagagcctccttgtgtctctggtaaccaccgtggtggtgtttgtggcctcgatggtgttaggagaatgccgacagatgtcctcttcgagtcaaatcggtaatgactcattccagctccaggtaaccccagtgcacctgctacctttatcccataccacgaggaagaatccagaaatgtatgaccttcctctgttgagaactaatagatrtgttgggttcatccttccacacccattacctgagcgttgagagatatgggaatctgtagtcgtctttttacctcagagaaagtgcacaccacatgccctgtgtctttgccacttctgtgaacaaccctggcgtcacagaggggaacctgggaacaaccctggcgtcacagaggggaacctgggaacaaccctggcgtcacagaggggaacctgggaacaaccctggcgtcacagaggggaacctgggaacaaccctggcgtcacagaggggaacctgggaacaaccctggcatcacagaggggaacctgggaacgaccctggcgtcacagaggggaacctgggaacgacactggcgtcacagaggggaacctgggaacaaccctggcatcacagagggcaactcctctctgttgaacaacactcatgggaaacagacacttggaaagctgacagcaaggtgctttctgagccccagttactcttccacctccccttgcctgaaggggccacagcccagaggctcagcacccacctcatggcctctgtgactatgacagtcactcttgagaggaagaaatatctgtgtcagggcaaggaggcttctctcttcccagcatcctctgcctcttcccggcgttgggtcctttgtgggtgcgccaccctcctgcactcctccttttcccttcttggggggcgcgatattttccagaggctttccctgaggagtggtcccatgaggtagtccgtggagcctactccacgctgtgttctttcggtccaacccggaggctctgagagctacacctgtggttcagtgagtcagccagatgtgtgattccagcccttggctgcagacaggtgagcattctctaagtgcggtcggccatccacatttgtgggtcctgcatccatggaattacgtagggtcaaccaactgtggagcaaatatattcaggatgcaaaacataaaaaagaacaagacaacagtaaaaaataatgcaaataaaaaacagtacagtgtaacaattatttacatagcatttacattgtattagggtattataaataatctagagatgatttaaaagtatataggaggacctacataggttatatgcaaatatacaccattttatatctgggacttgagcatccctggattttggtatccatcgggatcctggaccctatccctggtgaatackgaggaacaactgtactctttycttgttgcttctctgtaaccacttgaatctctcagatccccaytggggcccttgtcttggaggacagcctcttcagtgtccccagttatatgtatatattatwtatatatatatatatatatatatacacacacacactatatatayacacayacacacacacacacacacacacaaacacacattatatatttctgtttgttttgtttttttaagacggagtcttactctgttacccaggccggagtgcagtggcgcgatcttggcccactgcaacttccgcctcccaagttcaagtgattctcctgcctcagcctcccgagtaactgggattacaggcacccaccaccatgcccagctaattttgtatttttagtagagatggtgtttcaccatgttggccaggctggtctcgaactcctgacctcaagtgatccacccatctcggcctcccaaattgctaggattacaggtgtgtcaccacgcccagcctggtttatatatatatgtttttgtttttgtttttgytttttttttggcaaagtctcactctgttgcccaagctggagtggagtggcaagatctcggctcactgcaaactccacctcctgggttcaagcgattctcctgcctcagcctcccaagtagctgggacttcaggcacgcaccaccattcccagataatttttgtatttctagtagagacggagtttcactattttggctgggcttgttttgaactcctgaccttgtgatccgcccacctcggcctcccaaagtgctaggattgcaggcgtgagccaccgtgtccagctggtttatatatttttaaagggttgagagaaaaaaaagaatatgccgcagagactgtacatcactggcaacttctaaaatatttactgtctggctctttatgaaaaagtttgccgacccctgttactagttattcccaagcctagctcattaccagacagataccttgatgcgtgtgatttaaagcatacaaaaaacgattctgtggtcaaatgggctaggaattaaatatgcttctttatctttttagagacaggatctcactctgtcacccaggctggagtacggtggtgtgatcatagcttattgtaacctcaaactcctgggctcaagcgatcctcccatctcagcctcccaagtagctgggactacaggtgcatgccaccacatccagcttatttttatagagacaggatctcactatgttgcccaggctggtctcgaacttctggcctaaaatgatctcctgttttaggagtgctaggattatagacacaagccatagcacccaacctaaatacgttcctttagtacagaacttctagggccttattcccataagtgttataaatgtttggtgtctttattgtgtaccagatattccactgagtactttatatgatttcatttaatccttatcagcactgtgcttgctggccagtagctgtgcccccattttacagctaaggaagctgaggcacagtatggtcttgaccaaaaaccttcagctagtcatatatagtgagagggtaggtgttgttaccattttataggtgaggaaactcacaaaatgaaatatccttctcaacgtcactagagagtggcagagtttagagacaaagccatctgattttggagcctgtgctcagcttttagcagacacactgatttccaagaattgctaggatgtttctcagtgcagttgaccacaggactctctggaaagccttcaggactgaacttcctccagacagtttgggaaacactgcatgtgtctattatgaagccatcagctgagctcatcccccgtgcactccacaacgctgaggctctgcacatggctcaccagtgccaggtgctgccagtcagcagtgccgtgctgtttscacagcagcctgcatacgtctatattgcccagccygtttcacctggcggggtcacacaaaccaccccctggtattgttagcacgtccacataatggcatctccacagctgtgtcatccagaagaaacccatagccttgattaacctttgtaataagactccctatttgcatgcacagtgataggtgtgaagtacaaccttgtaccgttgtacactgtcaactagaaaataaaacagcacacttgaaacacccttgccttctagcaaagatcccatcttcccacacagaatgatggcaagaaaatgaggtctaaaatgtgtagaagtagtagaagaaataatctctttttctgtttgggttttgttccccagatggggtctagaaggagaggcagcctggaggactgggtctgctctccaggcattatggaggtgggttttcttttgcagcaaattcaggtgctttttttttttttgtagcaaattgcagcaaaatcaaaggctttttctatttggaaccagagttggggctttcggtcaagtggtgccctggattttcctccccagatacctgtcaactcccagtcacttgctctcacctgcctcatattcccccagtcctagggctctcaggccaggcttctagcagcatcacttagaaagttagcaccgggagaggaagcagaaccaaattcacggtgaatcacggccatagtgacattttcatcatgagtgtggatgaacaaaaggccctcatcccgattctttcatctgtgcattcagaatgtgaagaatacacttgcccgtgtggctgccgttggtagaggtcagtttttggcctgtttgattgatggggaaagctgtgcagccacctgttttggacccggctggagacatcccacttgaagactcaaagtcaggtgtccttgtactgattttctgattccttcttctcaggtcacagaagatgtgaattcaagtatcaagacatttttttgtcccaatgatacctacaatgacatggccacactcttcttcaacccgcaggagtctgccatcctccagctcttccaccaggatggtgagtgtctgcactgcagcccaatcrtgggtgattggtgtcatctcggacacagccaggcttgcccttcattccaagcaagaccaggacttctttgtaacgcccacccagacaaaagattggtttctgcctccwgtgttggaaggggaactggtatggggtgtggtcgggccyggtaggtctactgggccttggcaggcatccggtagtgggactcaggttggctcttcccttgcaggtactttcagccccgtcactctggccttgttcttcgttctctatttcttgcttgcatgttggacttacggcatttctgttccaagtggcctttttgtgccttctctgctgtgtggagctgcttttggacgtttagttgccaatgtcctaaaaaggtactctgtgtgtgtgcgtgtgtgtgcgcatgtgcatgtgtgtgcrcgtgtgcrtgtgtatgcatgtgtgtgcgtgtgcgtgcgttgatgtgtctgtgcccatgcatgcacatatgtgcataggcacaagagtatgagctgtaggtcctccccacagcctatcartgtggttcaaagccatgttctcggtgttttccttcactagctacattggattgggccacatctattcggggacctttgccctgattggtgcagcggctttcttgggcggggtggtccgcatgaccatcagcctcacggtcatcctgatcgagtccaccaatgagatcacctacgggctccccatcatggtcacactgatggtgagcacactccctccaggcccctgtcaggctcagggccacgtccgccccacaggacctatttttaggtctttgctttgtgtttcaggtggccaaatggacaggggactttttcaataagggcatttatgatatccacgtgggcctgcgaggcgtgccgcttctggaatgggagacagaggtggaaatggacaagtaaggccatgattttgctcatgtcctagtttcagaatgtataagctctgaggcctaaggaatgttgttattagggtaggaaacagtaactyacttttcttgggctgaaagaagcaacacacccattcctgagcatgtgtgagaatgtggagcagcccatgggctgggggctgcgggggcagggcaggggacacgggcactgtgggactgcagtgggcagggcctcttcgtggtggtttgactcccatggcattctggttagatatgaggtgaggtctctggatcaagttcgtgatgtgattgaatgtttaagggtatgccaagccccaggagtgagaatagcctgtttcacatgtgcccaccagaatgccctactgccagccgggattgttctgggcataatcacctcataacccacctgctaatccacaggtacctgggcttcctgtgtctagatagcaggcaaggcccttacgggctaacacgggggccagcaagccgtttctgtggagggccagacaggagtttattttcaactttccgggctgtatggtctctgtcacgactactcgactctgtcattgcagcaggaaagcagtaagcgtgacggacttgatcagtgggctacagtttgctgtgccctgatctaaagggggacccaagtgctgtgtttattttattattattgtttttcttttttgggacaggatctcactctgtcgcctaggctggagtagggtggcatgattatagctcactgcaacctatgcctcccaggctcaagcgatcctccacctcagcctcctgagtagctgggatcacaggcgcgtgccaccacacctggctaatttttaacattttttttatagaaatggggttttgctgtgttgcccaggctggttttgaactcctgggctcaagcaatctgctggcctcggcctcccaaagtgctgggattacatgcgtgagccgctgcacccagcccacccatttacccagttgtggtaaatgctgtagcagaattagcagttcaggggtagtatgtggagcgtgctgcagggcaccgaggagggcgtggccagcccctggaccagcagccagggcttcctggtgaggggatgttgctgttgagctgagggatgagcccgagcccatcagcctggtacagcagggtacgacattccaggtgcgggaacagcatgtgtcgggggatagaagtacaaaggaatgcatcgggtttgagggagagctggggcagttcagaagagccccccaccccgcccgtggtctgagcagrgctggagagccagcacagcttsctcccaggggcctgcgggcactgtcatgaggctggatgayttgccctcctcccccaggctgagagccagcgacatcatggagcccaacctgacctacgtctacccgcacacccgcatccagtctctggtgagcatcctgcgcaccacggtccaccatgccttcccggtggtcacrgagaaccgcggtaacgagaaggagttcatgaagggcaaccagctcatcagcaacaacatcaagttcaaggtaaagaaaacggcatgagaggaaaggcaggtgagagacaagcggtcccgtctcacacggcttagtgctttgcccacccctggctggggtggacttaccggctctcaggggaagttggcactgttctcatcacaygcgacagggagagtagatttgacagcaggggcagctttatcaggccgtgaagatgtgtgtgcgttcttgccgcaatgagcatgtggacagatctgtttttcaagtcagcagctttcatggtttgtttaccatgtgagagtatcagggagagttctagagatgccagcaacagaaatggacttcgacctccttaagaaagagaaagaaatccacaggaaagctcaggacagctgggaaagctgaaggaccagaaccaygtgctgtggggagcagtgcagggtctagcagacatcccttgggtaccaggargaaggagcactggccctgggttcctcctgattccgattcagaatccagggagagggggtatcctgttgcctcacttgggtcatgtgccactccttggctttgggggcaggcacgttgattgaaaattctatcaagacaggatgtaggagatggcttgttcccctctggagaawcaagctgctcttcccagattaaaggaaaccacagaagctgcagccaggtcctagggttcaggctcatttgaaccaccagcctgagccactcttttgaacctcagccccattaagttcctgcgtccggatgtgcttctgaccctccctgtcacccaaatccttaagctccatcagtactgctgtgttcgtttgcccatgcgcagtagcctgtggcctccccacccacagaaatccagcatcctcacccgggctggygagcagcgcaaacggagccagtccatgaagtcctacccatccagcgagctacggaacatgtgtgatgagcacatcgcctctgaggagccagccgagaaggaggacctcctgcagcagatgctggaaaggaggtgagarcctggcggggcccccactgcccgcagggctacacagcggtggggtgagccyttggctcagatgttktgaggtggctcctgagtttcctgggaaagttggatggggagcgggctgggaacatggatcagaagcgctcccgctgagggtatcccaggcagcatctggtttttgtgtaacagatacactccctaccccaacctataccctgaccagtccccaagtgaagactggaccatggaggagcggttccgccctctgaccttccacggcctgatccttcggtcgcagcttgtcaccctgcttgtccgaggagtttgttactctgaaagccagtcggtaagtctctccgaggcagaaatcagccaggccagrcctgacgaagctcgaggggttgggcgctgccggcgggccgtgaacagtgccatagggaaagctgaatgcaaggcgagaagtgcagagtggacttaggggaggagtcgccacagccgggtggtgagaagcaacagcggtttattccttcatagttcaaggccagaartacaaaatccgggtgtcaccagggcagcgctccctggctctggtgctgtccttgccccttcctagctcatgggagttgcctgcagaccttggtgctcctgactgtgaacacagcccccatcctcgccactgtcatcacacggcgttctcctgtgtatcttctctcctttccctaaggacgcttgtcaccggatttggggcccrccctaatccagcatgggttcatctgaactcggtcacatctgtagagaccttgtttccagaaaggtcgcattcataggtactagggcttaggacttggccatatcttttggtggggggacacattcaccccccagccactttacttagtgctttctcacttaaacttccwaataagccatttgcatctcatgaatcaggaagaaagggagtgcagacagatcaggggacttgcccagggtgccacagctaggacttggccaaggactyggtttgactrgagagctctcactctggagcgcttgctgctgctgcaccacctgcctcagcagcctggagctgggcatattcaggcatcaaggggaggggctctaaggtgaccctgctggccactgctgcctgagcacggacagtgtctgggttggaattgcagagcgccagccagccgcgcctctcctatgccgagatggccgaggactacccgcggtaccccgacatccacgacctggacctgacgctgctcaacccgcgcatgatcgtggtgagaagggctgccccggcctgtcccatgcggagctgcctcttcatgccgttggcgtctcaggcagtcagtgacacgtggtctctttgcaggatgtcaccccatacatgaacccttcgcctttyaccgtctcgcccaacacccacgtctcccaagtcttcaacctgttcagaacgatgggcctgcgccacctgcccgtggtgaacgctgtgggagaggtgagcgaggccccggccctgcccccacctttgagagaggatcccctagccaggtgctgtttgtgcacccakgcttctcaccagaaacgtaggcatcccaccaggaggggagagtgtggcccaacactagckttgaaccctgctcggcttccgtgcactcgggaccctttcccctgcctgccagcagatggcaccagcgtcccactggccgtcctttccagccagagccgcgcctctaccaggctgtgtcttcctcctgaaatgttgctcttcactccgtaccactggtgttccttggttctccacctgcgtaggkatttgcgcattagatgagagaatttcaagcaaaatactttgagttttacaaagatataaaacacctagtaattattgctgcagactttccttttttcttctttttagaacttcattattttcttattacacaaatattttcttattacacaaatatgatttcattgtaggaaaatacaaaaacacatatgagcaaaaaacaagcaaaaaccaaaccctcgtccctaccctgtcgcggtagccctggtaacttttcaaggccaccctctcagtcttttgttgttgttgctgttgttgttgttttgagacagggtctcactctgtcacccaggctggagtgcagtggcaagatctcggctcactgcagcctcgaccttccaggctcaagcagtcctcccacctcagcctcctgagtagctgggaccacaggcatgcgccactatgcccagctagtttttgtatttatggtagagacacggtttcgccatgttgcccaggctggtcttgaactcctgaactcaagtgattcacctgcctcggcctcccaaagtgctgggattacatgcgtcagccactgcacccggcctcagtcttttcttctayrcggcacaaccctggcatgcatagtgcgtacttacacaggttttgttgcagtaggttaacttatgtcccttgaaatgtaattgccaactacactgacagagtcctaacatagtttatgacgtggctttggagttcccaacaacagtgacacgtgggaaccactgtaacgacctgtaacaaatgactcccataggtcactttgcaaggtggtgagtatgaggcatggcaggggtcataatctcaggagacttcaagggccccaccgcttgcacatctgtgaagcaggctggtcatgatgggagctgagcgctgagcatgtgccctgtggaaggacattttagttcagatgccagctggcccaagccctttttggagctaaccttgtccccttggcctccartgtgtgagccctcgttagctgtttatcccaatcaagctgtgtctggctgtgcactatccaggcctccacattctgtgacaaactaacagggccggctcctgtcactyctgttctcgccagcgggttttaccctkaaggtgactcaggccttctctttgccctagatcgtggggatcatcacacggcacaacctcacctatgaatttctgcaggcccggctgaggcagcactaccagaccatctgacagcccagcccaccctctcctggtgctgcctggggaggcaaatcatgctcactccggcgggcacagctggctggggctgttccggggcatggaagattcccagtyacccactcactcagaaagccgggagtcatcggacaccttgctggtcagaggycctgggggtggttttgaaccatcagagcttggacttttctgacttccccagcaaggatcttcccacttcctgctccctgtgttcccaccctccagtgttggcacaggcccacccctggctccaccagagccagaagcagaggtagaatcaggcgggccccgggctgcactccgagcagtgttcctggccatctttgctactttcctagagaacccggctgttgccttaaatgtgtgagagggacttggccaaggcaaaagctggggagatgccagtgacaacatacagttcatgactaggtttaggaattgggcactgagaaaattctcaatatttcagagagtccttcccttatttgggactcytaacacggtatcctcgctagttkgttttaagggaaacactctgctcctgggtgtgagcagaggctctggtcttgccctgtggtttgactctccttagaaccaccgcccaccagaaacataaaggattaaaatcacactaataacccctggatggtcaatctgataataggatcagatttacgtctaccctaattcttaacattgcagctttctctccatctgcagattattcccagtctcccagtaacacgtttctacccagatcctttttcatttccttaagttttgatctccgtcttcctgatgaagcaggcagagctcagaggatcttggcatcacccaccaaagttagctgaaagcagggcactcctggataaagcagcttcactcaactctggggaatgctaccattttttttccaaagtagaaaggaagcacttctgagccagtgaccactgaaaggtatgtgctatgataaagcagatggcctatttgaggaagagggtgtctgcccttcacaaacacctctctctcccctgcactagctgtcccaagcttacatacagaggcccttcaggagggcctcctgtgccgcagggagggtgcgtggggaagatgcttcctgccagcacgtgcctgaaggtttcacatgaagcatgggaagcgcaccctgtcgttcagtgacgtcattcttctccaggctggcccgccccctctgactaggcacccaaagtgagcatctgggcattgggcattcatgcttatcttcccccaccttctacatggtatyagtcccagcaggcatccctggggcagacgtgctttggctcaagatggccttcatttacgtttagttttttttaaaaccgtggaggttgcccacgggcctcggcacctggccctggcagcacagctctcaggcccagccctgggcgacctccttggccaagtctgcctttcaccctggggtgagcatcagtcctggctctgctggtccagatcttgcgctcagcacactctagggaataattccactccagagatggggctgcttcaaggtcttttctagctgattgtggcccctccattttccccattttcttatctccctgaccaaaattgctttgacttctaaatgtttctgcttcccagaatgcacctgacttatgaaatggggataatactcccaggaaatagcgcaggacatcacaaggaccaaaaaggcaattcttatttaaatgttactatttggccagctgctgctgtgttttatggcagtgttcagagcttgatcacgttatttcttccttttattaagaaggaagccaattgtccaagtcaggagaatggtgtgatcacctgtcacagacactttgtcccctctccccgccccttcctggagctggcagagctaacgccctgcaggaggaccccggcctctcgagggctggatcagcagccgcctgccctgaggctgccccggtgaatgttattggaattcatccctcgtgcacatcctgttgtgtttaagtcaccagatattttgttcccatcagtttagcccagagatagacagtagaatgcaaatacctccctcccctaaactgactggacggctgccaaggaggccccaaacccaggccccatgcaaaggcacgtggtttccttttctcctctctctgcatctgcgctttccagataagcccaaagacagcaacttctccactcatgacaaatcaactgtgaccctcgctccttccatttctgtccattagaaaccagccttttcagcatctcacccattagcagccccatcacccagtgatcagtcgcctcagtaaagcagatctgtggatggggagcctacgggtggtaagaagtggtgttttgtgtttcatctccagcttggtgttccatggcccctaggcgaggtgatcagggagtggggccaatgggcccccggccctggctttgggaccttgtgctgagggatgatttgctcctgaccttgattaacttaacagttcccagctggaagggacactttcaggacccagtccactgtatggcatttgtgatgcagaattatgcactgacatgaccctgggtgacaggaaagcctttcgagaggcccaaggtggcctcgccagccctgcagtattgatgtgcagtattgcaccacagctctgcggaccttggccattgccrcagtcgcagcttccttttttctgtttgcactgtttgtttgtatgatgttagctaattccactgtgtatataaattgtattttttttaatttgtaaaatgctatttttatttgaacctttggaacttgggagttctcattgtaaccctaacatgtgagaataaaatgtcttctgtctcctctgtctcctttagccttttgtctccatgctgctttctttctttctttctttytttgagacagagtctcgctgtcacccaggctggagtgcagtggtgccatctcagctcactgcaagctccgcctcccaggttcacgccattctcctgcctcagcctcccgagtggctgggactacaggcgcccaccaccatgcctggctaattttttgtatttttggtagagatggggtttcaccatgttagccaggatggtctcaatctcctgacctggtgatcctacccgcctcggcctcccaaagtgctgggattacaggcgtgagccaccacgcccggccctgctgctctttctttcaagggatacttgctttttattttactccccctctttctgatgtgtggaaattacactaggacgtagttttagagtctcagagctctccctatgcagctgggcagtggggctcttcattcttgcgggtccacttctctgtattagacagtgaccttaataagaacagatttcatcctgtggatcttagcagaggtcaccgttgtctgtttctcccttcagatgaacactcttcctgatcctctcctctagaattcatctcctcctgctagcagccgcgtcctggaggagcagcggatggggaatccattctgtttcttcctggtgtttaggaagttgccccacamacagattgccccgatgtccaaccagaagaagtgaaactgctgctgggtctggagaggtgaagacccgtggccagcttctgttgttgccatcggccattgctttttgttcgcttgcttttggttttgcaagaagagcggcctctgtctctgatctgcttcaaatcatcattccatcagtgacagaagtggcygttccatcagtggtcgcagccagttcagctcctgcatccatccccaagtgttctgtaagtcccaggggcattttctgccttgtgtttttgtcatttttcaatcagttycattcaatgagaactccctgtgttacctgtgttacggtgacaccttgagaatgggctacttcccctcctagcaacccgcaacaccatcccagacctcaggagccaggtttgggccagtgctgtctcctgtcgctcttactttcatccttgtcattctctaccccctggttttcctggtatttaaagtccaggtagagaagattttgactggaggtggttaggtgaggctctccccccacctcaaccccctgccattagttcactgggagcctccccctttcctccgcaaggagcaagttactacttcatttcctcttttcccaatttctggacaagaccaaggcaatttgaccaacatttatggggcatcaactctgagagtgcygaaggggcatttgccctcaaagagcttgcagtctagggacgtagacacaagcaattgcacataggcaactcgtgttgtgtgctattataacagttacatgtgcaacactgcctacgaagggactcattgttactaggcatgaggtaccaggaaagaagtagtgttcatatgagccttaagaaatcagtacaatgtcctcgggaggaccagaggaaggacaccccaggtggaaggaacagcagaaataaaggcacagtggcatgtgtgggtgtggggtgttggagtgtcatagaatctgatgaggttgggatccatgggggtaacaggtgggaaaacagtttactctgtttaaggtgaacttattgcctggtgttttgtgctcagagcaaataccctcttcaggagcagatacaaaaagccggcatcttctccagcagctcttagtaaaatacaagcccaggcccttcagacccggattaggcaaagactatgtctgttttccaaatacttgttagtacacaaaaggcacatgaacttgtagtttgtctgcatggcaaacctttcttcactttgctcagtttttatttttttgagacaagtctcattctgtcacccaggctggaatgcagtggcacaataccagctcactgcagcctccacctcccaggctcaagccatcctcccacttcggcctcctgaatagctggaactacaggtgcacatcatcatgcctggctaatttttaaattttttgtagagatggggtctcactctattgctcaggctggtcttgaactcctgggctcaagtgatttgcccaccttggcctcccaaaatgctgggattacaggagtgagccaccacacccggcctgctcagcttttaaattcaacactctgcctactcttttcaaaactaaaagtaccattaccttagctgtagaacctaactctctcgaaatgtaccagagaaaatctaattaatactctcattttctgaatgttcccccctaaaaacaacaaaaaccccactaggagtggaatttgaggcctccccaaccaccyaccaaaaaaggagggtgaaatgaaaggaagaagaaaaactcagcattctttcctctgacaaagagtaaaacgacaaggaatatcggcctgaattctcttcccaagaagaaagaaagcacaccaacgcaggcatttgtcttctgtccatggkgctgaagtttattcactttcaaaccactttcagtaacaggtgaggttctaccttaaaatttaatgcatggggtgggagaggcgaggaagtcaccatcaaaccactttatctacagttagcataagatgtgagaagtgttgacaggaagctgcagcttaratgggatgatcacaactccatggcaacaagrtgacacraatgcagcagagamcccaggggacaggagcctcttgcagtctgtccctaggcccagccctgcttgtcctccctggctgttatcttcrgtactgcaaagagaacacagacatatctggcttggtgacctggctgtcctggaaaagtcagcttcatgtatgagtgtgcccatcctctgaacttgattactgaccacctgcttcccaccggcccccaccccagcctgatgaccctctgagcttcatgaattgataagcaagttactcatcagagtaaatttcacttaagcccttcaggatcttgcaattctggggaggaatatgaactgctaatcagccatgcaaagataacttggctctatgaatattttaatttcccagtgctagtggcagttgcttttttttttttttttttttgagacggagtcttgctctgtcgcccaggctggagtgcagtggygccatctctgctcactgcaagctccgcctcccgggttcacgccattctcctgcctcagcctccggagtagctaggacttacaggcgcctgccaccacgcctggctaattttttgtatttttagtagagacggggtttcaccgtgttagccaggatggtctccatctcctgacctcgtgatccacccgccttggcctcccaaagygctgggattacaggcgtgagccaccgygcctggcctttttttttttttttttttttttttgagacagtctcgctctatcacctaggctggactgcagtggcgygatctctgctcactgcaacctctgcctcctgggttcaagtgattctcctgcctcagcctcccaagtagctgagagtacaggtgccygccaccacacccagctaatttttgtatttttagtagagctggggtttcaccatgttggccaggatagtcttgatctcttgacctcatgatcsgcctgcctcggcctcccaaagtgctgggattacaggcgtgagccacygtgcccagcccccccccttytttttttaagcattttctcagcagactagctaaggacaatagatggcatgtcctgacacccatggggcactctgggtgttggggcagaaacttgagagggaatgagcttctgcattggtccctttcctgctgaaggtgtctcccagtagtgtccatcccatcccatttccatccccagttcctcttacccggaagctgttacagcccagtccgctctgggctccaatcctgtccatcctgcccccgaagcagctggatctcygcaggctccgaggggcagtgagcagcgccctcagcttgctttttaggagggcagatcgatcagaggagtcccaggggccccgcccgagggcacctccatctctctgggctgggctgacttccccggtccagggaggcacctcagggarggggctgagagcagcccccgcttcttcattcggctcactgagcacttgtgggggcacgacctcatcttctaaaggcatcttttcttccaaatggtccagcaaattctttagaaaaggaaaatacagggaaagggataaacctcactgacttggaggaaatcaagaggagtgagcacagcatcagaaagccccctggccccagactgcacccgctttcctggccctaccttgaaatccatcaggtctgcgttggacacggcattgtacatgggattagctctggtctgacctaggagctggaatgccagtaaaaggaggaagctcacggtggtggtggagaaggagctcatgctggcgtcgtcaaggagcaatccactgcttgctgctctgtctctcccctctggttcctctctggttcccctctcttggcctacgtctgtccctgtctcccagctgcccagtgccgcctctttttatagccccccagctctccaagcacgcaggagagacagaaccctccccattctgtcacttgcagtgataaagctgccaagtgagaagccagcaggagatgcccttttaaagttatcatcccgcagggcttgtcacagcccctctctgccttgggcagccccaacagccccccagaccctcagctgcaagagccgcattcttactgatttgactcaagaggctcccacttcaaaggtgtgagaagagtaaaaaagagtccttggttatctcaccgccgtgcctcaggattctttctcctcgacgctggtacccgtgcggggaaacagagggtgacgcttggctggtgcccagctcccctggtttgtttgtggctcagctgtcagggcctccaaataagggtggagaggaggaaatggcaggcagccagcagcccgagacaaatggatccagatgctcaagctggcctcacacctgcctcatccgccacgtgggcagacctctggcctcagacagggctgccttcacccctggcagtccctctccatggtcaggcgaaaggaagttattttttagtatataaagtcagctgagaaccaaatgtgatgaagctcccaggaatccaacccccaaatagaaatagcaagaaaaggcgggggagcacaagcatcctctctccaaagctcctcctcttccatgtcccccgcgaccctcctccagcatgctgcggggacaggcttagaggacgcagccaatttcatttcttccgttgctgtttatagatgctcagactcttcgtgtctgaagtttgttaacatccccctgcccttcctgggcttgtgcccgtggcaacttgaccgatggaggaagggaggtgggggtgaaggaggtatagtcagtttccctcaatgccttctacatccttccctgaggacgtggcaagtggcaagtgaccgagccaccaaggtcacaatttccctggcccccaaaagggaaataacaggcagcaagtctgtctatgtttaatgaatggcctgtttgctaagcactgaactcagtgttagccattaccattcaatgcaacgtatactgggggaaaactctaaatttgaagggctgagagaccagtactgtagcccaaaacaaaccagttgcatacctcttcgcagccttactttccttgtgtgtaaaatgagaaagaatgttaaaaaccggccgggtgcagtggctcacacgtataatcccagcactttgggaggctaaggtgggtggatcacctgaggccaggagtttgagaccagccctaccaacatggcaaaactctgtctctactaaaaatataaaaattagctgggtgtggtggcatgtgcctgtaatccccgctactagggaggctgaggtaaaagaattgcttgaccttgggaggcggaggttgtagtgaaccaagatcgcaccactgcactctagcctgggcaacagagtgggactcggtctcaaaaaataaataaataaatgaatgaataaagtagaaatcttccctgcctaccttgcaggattgttgtggagcccaagtgagctgagaacgtgtcaacacataacaagtgtgcagtgctgagtccctgcaagatggccatcatagttgtctttattggttgcttgtagcatgcctagcactgtgctgagaactttatggaaatgattttattttgatcaccatccccaggtggtagatagcattgtccttgcttacaagggaacagaactgagcccgagaggctatgccacttgcccaaggccactaggtgcctaagtggcggaaccaggactggatccccaggtctgacgctgatgtctgtatcctagcctatttcacgtagagagctgccaccttacctcttagctgcattccccaattaaacccccattccccatctttcagatgccccaagggagctccttcaccttccccatgcccctggggctgtagcttttttgtgcacttaccaagtctgtgtgtgttggctgctctcctgatctatttctacaccgaatgtgttttaatccactccttagaagctcagaaaatgtgtgttgagtgaccagctctgtcctggctggccagatctgtccccaggtgtgctgacctcatgactgaccaggtgaacaggacgttgtgcagccataaggttggaaatcagggcagcaagtgactagaggtcacaagaggtatccagggtgatattattctaagataagataaaagggaccctctttggcaagccttggggtttgtctgtaggtggggatctaatatttcatggggtggttagaagcagcctgtaggagtgagagagaagaaaagtaacaggcacagaaagccaggcccacctccatccccacctcttccacggctgaaaaatcaaaagccttttatttccttatcactggaaagaagtcatcttagtcatacaacgggtggagcactgcaaacgggtgggagaatccagaatccgggtgttgccagattccagcccagagtttggcttcacgattctctgggggtatgccttgggctgctgcagggagccccagagtgtgcagtgtcacccgcgtgcagagctggcacgaaatccccaacacattcgtggcatgattctgcgggacccagatggtctaaagcagaagccccagttgggaaaaattggttcatacttagggatgatcgttgctgactttgaaaatgatgttttgtttctttggtttaatatggaggtcactaagggctgaagactggggacagtttccctagaaaacaaagcccaaggcaaaaggtcactcgctaaagttttgtgggggttcctattcaaaggaagcaagagtgaggcggagtgagaggctgttttagttaactactgccgggtaacaagtcaccccagactgggcgtggtgactcacgcctgtcattccaacactttgggaggatcatttgaacccaggagttcaagaccaccctgggcaacatggcaaaaacccatttgtactaaaaatacaaaaaattagctgggtgcagtggtgcgtgcctgtcatcccagctaccctggacactgaggtgggagaatcaccacagcccaagaagttgaggctgccgtgagccatgaccaagccactgcactccagcctgggtgacagagtgagaacctgtctcaaaaagaacaaaagccaggcatggtggctcacgcctgtaatactagccctttgggaggctgaggcaggaagatctcttgagctcaggagttccagacaagactgagcaacataaggaaccctgtttttaataaataaacaaacaaaaaacaaaacaaaaaccaagtcaccccaaaccttagcaacttcacacaatgcacatctattatctcatcacctctgtgctctgtggatcagggatctggccctgcttggcctggggcccctgggcaatgaaggcgttggctgcggctgcagtcatctcaaggcttggctgggggaggataggctttcaggctcactcctgcagctgttggcagaagccacaggttctcgctggctggtggctggtggaaacatcagtttcttgccacgtgggtctctccatggagacgcaactgtcttctattaggtcaggcgagaaagagaagttacggaagaagccacagtctctttgttacctaatctcagaagtgacatcccattcttcatgttgtactgttctgtgtcccttagaagtgagtctctgggtctcactcacactctaagggagggggttacagagggtatgaagaccaggaggttggggatctctgggggccttctgaaagcactgcccacacaaatagagaaggaaggaaagcaaatgtaaggtgacattggctgagtgcagtggctcatgcctgtaatcccagcactttgggaggctgaggtgggtggatcacttgaggtcaggagctcgagaccagcctgaccaacatggtgaaaccccgtctctactaaaaatacaaaaattagccaggcatggtggtgtgcacctgtagtcccagctactcgggaggctgaggcaggagaatcatgaagggcagggctctgcaggaaggttgacttatttgggagtgtcttagtttaagttctcttgaaccggagacagatattccagtattagtggctgatcttggagacaaacccaggaaatgtcagtggagagtggggaagtgatacagaaaaagtagaagtcagtgaccacctctggcagtaggtgcttaatcctcctcccacagagaactccaaacaggttctctgtttggagaacagagacacatgccacctatgactcaagggagctgggtgtttgttttattttattttattttattttatttttgaaacagagtcttgctctgtcacccaggctggagtgaagtggtaatttcagccttgacttcccggctcagtgatcctcccatttcagcctcccgagtagctggactacagatgttcaccaccatacccggctaattttttttcttttatttttagtagagacgaggtctctctttgttgcccaggccggtctcgaacatctgaactcaatttatcctcccacctcagcctcccaaagtgctgggattacaagtgtaagctgctgcaccaggcgtgagctgggtctttaaatgccaactcctggccaggtgcagtggctcacacctgtaatcccagcactttgggaggctaaggtaggaggattgcttgaggccgtgagttcaaaatcagccttgcaaacatagtgagactctccatctctacagaaaaaaaaaattattttaattagccagacatggcagcatactcctgtaatcccagctacttgggaggctgacgtgggaggatcgcttgagcccaagagtttgaggttatagtgagctatgatcatgccactgcactccagccttggtgacagagcaagactctgtctctatttaaaaaaaaaaaaaaaaaaaaaaagccagctcctgtcagatgttggttgagcactgctcaggtcaatgtcaattccccagcacttcctgccggccccaaggagctgagtgggctgcggctgccagagaaagttcttaggcagaaaagtgcagtgctgctggatgaaaggattgatgtgtgctgaagatcaggggctacgggcctctgccgtgcccgaaacgggacagctagaggcaggagagtgggagccagtgtccaagggcagatactgagtttggttctagaaacgcttaaggcagctgtatggggcaggctccagaccccaagggaaaaatggatcacttggtggaataagactgattatttaagctaaggcagtggatgaaaaatcctagagagaggctgagatctacaacatgaacaaagacaaatggccaagttcatgtcatggtttagacccagctctgcaggaagagaaatgcattttttttccttgccacaaatcattctcagaaaggccaaagcaggtggggcacggtggctcatgcctgtaatcccagcactttgggaggccgaggagggcggatcacgaggtcaggagatggagaccattctggctaacacactgaaaccccgtctctactaaaaatacaaaaaaattagccgggcgtggtggcgcacacctgtagtctcagctact

SEQ ID NO: 8774 - DNA, 14629 bp, Homo sapiens
caggctggtttcaagctcctgggctcaagcaatcctcacaccttggcctcccaaagtgctgggattacaggtgtgagccactgtgcccagccttacgcttgttatcttattttattttttatttattaattattttttgagacagagtcttgctctgctgcccaggctggagtgcagtggcacaacctcggctccctgcaacctctgcctccctggttcaagcaattgtcctgyttcagcctcctgagtagctgggactagaggcgtgtaccaccacacttggctaatctttttgtatttttagtggagacggggtttcactgtgttggccaggctggtctcgaactcctgacctcaaatgatctgcctgcctcggcttcccaaagtgctgggattacaggcgtgagccaccacacccggactcttgttattttaatctttccagaaagacgtgttggtgaaaacagactgaggagatttagtccatggcttcagagctgcaagaagcttcaatagagagtgaactggtttttttcaggtcttcagtgttgaagtcacagaagtcaggacaacgttgggcctgaaagcttcatctcatgtccgtgattttgcacctgggatagtctcaaggaacactgagcccctctccctccctcttatggctgatttgacccttcgttgttgtgttttgttttgttttgttttgtttttgagatggagtctcactgttgcccaggctggagagcagtggtgcgatctcggctcactgcgacctctgcctcccaggttcaagcaattctcctgcctcagcctcccgagtagctgagactacaggtgtgcgccaccacgcccggctaatttttttgtatttttagtagagacggggtttcagtgtgttagccagaatggtctccatctcctgacctcgtgatccgccctcctcggcctcccaaagtgctgggattacaggcatgagccaccgtgccccacctgctttggcctttctgagaatgatttgtggcaaggaaaaaaaatgcatttctcttcctgcagagctgggtctaaaccatgacatgaacttggccatttgtctttgttcatgttgtagatctcagcctctctctaggatttttcatccactgccttagcttaaataatcagtcttattccaccaagtgatccatttttcccttggggtctggagcctgccccatacagctgccttaagcgtttctagaaccaaactcagtatctgcccttggacactggctcccactctcctgcctctagctgtcccgtttcgggcacggcagaggcccgtagcccctgatcttcagcacacatcaatcctttcatccagcagcactgcacttttctgcctaagaactttctctggcagccgcagcccactcagctccttggggccggcaggaagtgctggggaattgacattgacctgagcagtgctcaaccaacatctgacaggagctggctttttttttttttttttttttttaaatagagacagagtcttgctctgtcaccaaggctggagtgcagtggcatgatcatagctcactataacctcaaactcttgggctcaagcgatcctcccacgtcagcctcccaagtagctgggattacaggagtatgctgccatgtctggctaattaaaataattttttttttctgtagagatggagagtctcactatgtttgcaaggctgattttgaactcacggcctcaagcaatcctcctaccttagcctcccaaagtgctgggattacaggtgtgagccactgcacctggccaggagttggcatttaaagacccagctcacgcctggtgcagcagcttacacttgtaatcccagcactttgggaggctgaggtgggaggataaattgagttcagatgttcgagaccggcctgggcaacaaagagagacctcgtctctactaaaaataaaagaaaaaaaattagccgggtatggtggtgaacatctgtagtccagctactcgggaggctgaaatgggaggatcactgagccgggaagtcaaggctgaaattaccacttcactccagcctgggtgacagagcaagactctgtttcaaaaataaaataaaataaaataaaataaaacaaacacccagctcccttgagtcataggtggcatgtgtctctgttctccaaacagagaacctgtttggagttctctgtgggaggaggattaagcacctactgccagaggtggtcactgacttctactttttctgtatcacttccccactctccactgacatttcctgggtttgtctccaagatcagccactaatactggaatatctgtctccggttcaagagaacttaaactaagacactcccaaataagtcaaccttcctgcagagccctgcccttcatgattctcctgcctcagcctcccgagtagctgggactacaggtgcacaccaccatgcctggctaatttttgtatttttagtagagacggggtttcaccatgttggtcaggctggtctcgagctcctgacctcaagtgatccacccacctcagcctcccaaagtgctgggattacaggcatgagccactgcactcagccaatgtcaccttacatttgctttccttccttctctatttgtgtgggcagtgctttcagaaggcccccagagatccccaacctcctggtcttcataccctctgtaaccccctcccttagagtgtgagtgagacccagagactcacttctaagggacacagaacagtacaacatgaagaatgggatgtcacttctgagattaggtaacaaagagactgtggcttcttccgtaacttctctttctcgcctgacctaatagaagacagttgcgtctccatggagagacccacgtggcaagaaactgatgtttccaccagccaccagccagcgagaacctgtggcttctgccaacagctgcaggagtgagcctgaaagcctatcctcccccagccaagccttgagatgactgcagccgcagccaacgccttcattgcccaggggccccaggccaagcagggccagatccctgatccacagagcacagaggtgatgagataatagatgtgcattgtgtgaagttgctaaggtttggggtgacttggtttttgttttgttttttgtttgtttatttattaaaaacagggttccttatgttgctcagtcttgtctggaactcctgagctcaagagatcttcctgcctcagcctcccaaagggctagtattacaggcgtgagccaccatgcctggcttttgttctttttgagacaggttctcactctgtcacccaggctggagtgcagtggcttggtcatggctcacggcagcctcaacttcttgggctgtggtgattctcccacctcagtgtccagggtagctgggatgacaggcacgcaccactgcacccagctaattttttgtatttttagtacaaatgggtttttgccatgttgcccagggtggtcttgaactcctgggttcaaatgatcctcccaaagtgttggaatgacaggcgtgagtcaccacgcccagtctggggtgacttgttacccggcagtagttaactaaaacagcctctcactccgcctcactcttgcttcctttgaataggaacccccacaaaactttagcgagtgaccttttgccttgggcttygttttctagggaaactgtccccagtcttcagcccttagtgacctccatattaaaccaaagaaacaaaacatcattttcaaagtcagcaacgatcatccctaagtatgaaccaatttttcccaactggggcttctgctttagaccatctgggtcccgcagaatcatgccacgaatgtgttggggatttcgtgccagctctgcacgcgggtgacactgcacactctggggctccctgcagcagcccaaggcatacccccagagaatcgtgaagccaaactctgggctggaatctggcaacacccggattctggattctcccacccgtttgcagtgctccacccgttgtatgactaagatgacttctttccagtgataaggaaataaaaggcttttgatttttcagccgtggaagaggtggggatggaggtgggcctggctttctgtgcctgttacttttcttctctctcactcctacaggctgcttctaaccaccccatgaaatattagatccccacctacagacaaaccccaaggcttgccaaagagggtcccttttatcttatcttagaataatatcaccctggatacctcttgtgacctctagtcacttgctgccctgatttccaaccttatggctgcacaacgtcctgttcacctggtcagtcatgaggtcagcacacctggggacagatctggccagccaggacagagctggtcactcaacacacattttctgagcttctaaggagtggattaaaacacattcggtgtagaaatagatcaggagagcagccaacacacacagacttggtaagtgcacaaaaaagctacagccccaggggcatggggaaggtgaaggagctcccttggggcatctgaaagatggggaatgggggtttaattggggaatgcagctaagaggtaaggtggcagctctctacgtgaaataggctaggatacagacatcagcgtcagacctggggatccagtcctggttccgccacttaggcacctagtggccttgggcaagtggcatagcctctcgggctcagttctgttcccttgtaagcaaggacaatgctatctaccacctggggatggtgatcaaaataaaatcatttccataaagttctcagcacagtgctaggcatgctacaagcaaccaataaagacaactatgatggccatcttgcagggactcagcactgcacacttgttatgtgttgacacgttctcagctcacttgggctccacaacaatcctgcaaggtaggcagggaagatttctactttattcattcatttatttatttattttttgagaccgagtcccactctgttgcccaggctagagtgcagtggtgcgatcttggttcactacaacctccgcctcccaaggtcaagcaattcttttacctcagcctccctagtagcggggattacaggcacatgccaccacacccagctaatttttatatttttagtagagacagagttttgccatgttggtagggctggtctcaaactcctggcctcaggtgatccacccaccttagcctcccaaagtgctgggattatacgtgtgagccactgcacccggccggtttttaacattctttctcattttacacacaaggaaagtaaggctgcgaagaggtatgcaactggtttgttttgggctacagtactggtctctcagcccttcaaatttagagttttcccccagtatacgttgcattgaatggtaatggctaacactgagttcagtgcttagcaaacaggccattcattaaacatagacagacttgctgcctgttatttcccttttgggggccagggaaattgtgaccttggtggctcggtcacttgccacttgccacgtcctcagggaaggatgtagaaggcattgagggaaactgactatacctccttcacccccacctcccttcctccatcggtcaagttgccacgggcacaagcccaggaagggcagggggatgttaacaaacttcagacacgaagagtctgagcatctataaacagcaacggaagaaatgaaattggctgcgtcctctaagcctgtccccgcagcatgctggaggagggtcgcgggggacatggaagaggaggagctttggagagaggatgcttgtgctcccccgccttttcttgctatttctatttgggggttggattcctgggagcttcatcacatttggttctcagctgactttatatactaaaaaataacttcctttcgcctgaccatggagagggactgccaggggtgaaggcagccctgtctgaggccagaggtctgcccacgtggcggatgaggcaggtgtgaggccagcttgagcatctggatccatttgtctcgggctgctggctgcctgccatttcctcctctccacccttatttggaggccctgacagctgagccacaaacaaaccaggggagctgggcmccagccaagcgtcaccctctgtttccccgcacgggtaccagcrtcgaggagaaagaatcctgaggcacggcggtgagataaccaaggaytcttttttactcttctcacacctttgaagtgggagcctcttgagtcaaatcagtaagaatgcggctcttgcagctgagggtctggggggctgttggggctgcccaaggcagagaggggctgtgacaagccctgcgggatgataactttaaaagggcatctcctgctggcttctcacttggcagctttatcactgcaagtgacagaatggggagggttctgtctctcctgcgtgcttggagagctggggggctataaaaagaggcggcactgggcagctgggagacagggacagacgtaggccaagagaggggaaccagagaggaaccagaggggagagacagagcagcaagcagtggattgctccttgacgacgccagcatgagctccttctccaccaccaccgtgagcttcctccttttactggcattccagctcctaggtcagaccagagctaatcccatgtacaatgccrtgtccaacgcagacctgatggatttcaaggtagggccaggaaagygggtgcagtctggggccagggggctttctgatgctgtgctcactcctcttgatttcctccaagtcagtgaggtttatccctttccctgtattttccttttctaaagaatttgctggaccatttggaagaaaagatgcctttagaagatgaggtcgtgcccccacaagtgctcagtgagccgaatgaagaagcgggggctgctctcagccccctccctgaggtgcctccctggaccggggaagtcagcccagcccagagagatggaggtgccctcgggcggggcccctgggactcctctgatcgatctgccctcctaaaaagcaagctgagggcgctgctcactgcccctcggagcctgcggagatccagctgcttcgggggcaggatggacaggattggagcccagagcggactgggctgtaacagcttccgggtaagaggaactggggatggaaatgggatgggatggacactactgggagacaccttcagcaggaaagggaccaatgcagaagctcattccctctcaagtttctgccccaacacccagagtgccccatgggtgtcaggacatgccatctattgtccttagctagtctgctgagaaaatgcttaaaaaaaraagggggggggctgggcacrgtggctcacgcctgtaatcccagcactttgggaggccgaggcaggcsgatcatgaggtcragagatcaagactatcctggccaacatggtgaaaccccagctctactaaaaatacaaaaattagctgggtgtggtggcrggcacctgtactctcagctacttgggaggctgaggcaggagaatcacttgaacccaggaggcagaggtygcagtgagcagagatcrcgccactgcagtccagcctaggtgatagagcgagactgtctcaaaaaaaaaaaaaaaaaaaaaaaaaggccaggcrcggtggctcacgcctgtaatcccagcrctttgggaggccaaggcgggtggatcacgaggtcaggagatggagaccatcctggctaacacggtgaaaccccgtctctactaaaaatacaaaaaattagccaggcgtggtggcaggcgcctgtaagtcctagctactccggaggctgaggcaggagaatggcgtgaacccgggaggcggagcttgcagtgagcagagatggcrccactgcactccagcctgggcgacagagcaagactccgtctcaaaaaaaaaaaaaaaaaaaagcaactgccactagcactgggaaattaaaatattcatagagccaagttatctttgcatggctgattagcagttcatattcctccccagaattgcaagatcctgaagggcttaagtgaaatttactctgatgagtaacttgcttatcaattcatgaagctcagagggtcatcaggctggggtgggggccggtgggaagcaggtggtcagtaatcaagttcagaggatgggcacactcatacatgaagctgacttttccaggacagccaggtcaccaagccagatatgtctgtgttctctttgcagtacygaagataacagccagggaggacaagcagggctgggcctagggacagactgcaagaggctcctgtcccctgggktctctgctgcattygtgtcaycttgttgccatggagttgtgatcatcccatytaagctgcagcttcctgtcaacacttctcacatcttatgctaactgtagataaagtggtttgatggtgacttcctcgcctctcccaccccatgcattaaattttaaggtagaacctcacctgttactgaaagtggtttgaaagtgaataaacttcagcmccatggacagaagacaaatgcctgcgttggtgtgctttctttcttcttgggaagagaattcaggccgatattccttgtcgttttactctttgtcagaggaaagaatgctgagtttttcttcttcctttcatttcaccctccttttttggtaggtggttggggaggcctcaaattccactcctagtggggtttttgttgtttttaggggggaacattcagaaaatgagagtattaattagattttctctggtacatttcgagagagttaggttctacagctaaggtaatggtacttttagttttgaaaagagtaggcagagtgttgaatttaaaagctgagcaggccgggtgtggtggctcactcctgtaatcccagcattttgggaggccaaggtgggcaaatcacttgagcccaggagttcaagaccagcctgagcaatagagtgagaccccatctctacaaaaaatttaaaaattagccaggcatgatgatgtgcacctgtagttccagctattcaggaggccgaagtgggaggatggcttgagcctgggaggtggaggctgcagtgagctggtattgtgccactgcattccagcctgggtgacagaatgagacttgtctcaaaaaaataaaaactgagcaaagtgaagaaaggtttgccatgcagacaaactacaagttcatgtgccttttgtgtactaacaagtatttggaaaacagacatagtctttgcctaatccgggtctgaagggcctgggcttgtattttactaagagctgctggagaagatgccggctttttgtatctgctcctgaagagggtatttgctctgagcacaaaacaccaggcaataagttcaccttaaacagagtaaactgttttcccacctgttacccccatggatcccaacctcatcagattctatgacactccaacaccccacacccacacatgccactgtgcctttatttctgctgttccttccacctggggtgtccttcctctggtcctcccgaggacattgtactgatttcttaaggctcatatgaacactacttctttcctggtacctcatgcctagtaacaatgagtcccttcgtaggcagtgttgcacatgtaactgttataatagcacacaacacgagttgcctatgtgcaattgcttgtgtctacgtccctagactgcaagctctttgagggcaaatgccccttcagcactctcagagttgatgccccataaatgttggtcaaattgccttggtcttgtccagaaattgggaaaagaggaaatgaagtagtaacttgctccttgcggaggaaagggggaggctcccagtgaactaatggcagggggttgaggtggggggagagcctcacctaaccacctccagtcaaaatcttctctacctggactttaaataccaggaaaaccagggggtagagaatgacaaggatgaaagtaagagcgacaggagacagcactggcccaaacctggctcctgaggtctgggatggtgttgcgggttgctaggaggggaagtagcccattctcaaggtgtcaccgtaacacaggtaacacagggagttctcattgaatgaaactgattgaaaaatgacaaaaacacaaggcagaaaatgcccctgggacttacagaacacttggggatggatgcaggagctgaactggctgcgaccactgatggaacagccacttctgtcactgatggaatgatgatttgaagcagatcagagacagaggccgctcttcttgcaaaaccaaaagcaagcgaacaaaaagcaatggccgatggcaacaacagaagctggccacgggtcttcacctctccagacccagcagcagtttcacttcttctggttggacatcggggcaatctgtgtgtggggcaacttcctaaacaccaggaagaaacagaatggattccccatccgctgctcctccaggacgcggctgctagcaggaggagatgaattctagaggagaggatcaggaagagtgttcatctgaagggagaaacagacaacggtgacctctgctaagatccacaggatgaaatctgttcttattaaggtcactgtctaatacagagaagtggacccgcaagaatgaagagccccactgcccagctgcatagggagagctctgagactctaaaactacgtcctagtgtaatttccacacatcagaaagagggggagtaaaataaaaagcaagtatcccttgaaagaaagagcagcagggccgggcgtggtggctcacgcctgtaatcccagcactttgggaggccgaggcgggtaggatcaccaggtcaggagattgagaccatcctggctaacatggtgaaaccccatctctaccaaaaatacaaaaaattagccaggcatggtggtgggcgcctgtagtcccagccactcgggaggctgaggcaggagaatggcgtgaacctgggaggcggagcttgcagtgagctgagatggcaccactgcactccagcctgggtgacagcgagactctgtctcaaaaaaagaaagaaagaaagaaagcagcatggagacaaaaggctaaaggagacagaggagacagaagacattttattctcacatgttagggttacaatgagaactcccaagttccaaaggttcaaataaaaatagcattttacaaattaaaaaaaatacaatttatatacacagtggaattagctaacatcatacaaacaaacagtgcaaacagaaaaaaggaagctgcgactgyggcaatggccaaggtccgcagagctgtggtgcaatactgcacatcaatactgcagggctggcgaggccaccttgggcctctcgaaaggctttcctgtcacccagggtcatgtcagtgcataattctgcatcacaaatgccatacagtggactgggtcctgaaagtgtcccttccagctgggaactgttaagttaatcaaggtcaggagcaaatcatccctcagcacaaggtcccaaagccagggccgggggcccattggccccactccctgatcacctcgcctaggggccatggaacaccaagctggagatgaaacacaaaacaccacttcttaccacccgtaggctccccatccacagatctgctttactgaggcgactgatcactgggtgatggggctgctaatgggtgagatgctgaaaaggctggtttctaatggacagaaatggaaggagcgagggtcacagttgatttgtcatgagtggagaagttgctgtctttgggcttatctggaaagcgcagatgcagagagaggagaaaaggaaaccacgtgcctttgcatggggcctgggtttggggcctccttggcagccgtccagtcagtttaggggagggaggtatttgcattctactgtctatctctgggctaaactgatgggaacaaaatatctggtgacttaaacacaacaggatgtgcacgagggatgaattccaataacattcaccggggcagcctcagggcaggcggctgctgatccagccctcgagaggccggggtcctcctgcagggcgttagctctgccagctccaggaaggggcggggagaggggacaaagtgtctgtgacaggtgatcacaccattctcctgacttggacaattggcttccttcttaataaaaggaagaaataacgtgatcaagctctgaacactgccataaaacacagcagcagctggccaaatagtaacatttaaataagaattgcctttttggtccttgtgatgtcctgcgctatttcctgggagtattatccccatttcataagtcaggtgcattctgggaagcagaaacatttagaagtcaaagcaattttggtcagggagataagaaaatggggaaaatggaggggccacaatcagctagaaaagaccttgaagcagccccatctctggagtggaattattccctagagtgtgctgagcgcaagatctggaccagcagagccaggactgatgctcaccccagggtgaaaggcagacttggccaaggaggtcgcccagggctgggcctgagagctgtgctgccagggccaggtgccgaggcccgtgggcaacctccacggttttaaaaaaaactaaacgtaaatgaaggccatcttgagccaaagcacgtctgccccagggatgcctgctgggactaataccatgtagaaggtgggggaagataagcatgaatgcccaatgcccagatgctcactttgggtgcctagtcagagggggcgggccagcctggagaagaatgacgtcactgaacgacagggtgcgcttcccatgcttcatgtgaaaccttcaggcacgtgctggcaggaagcatcttccccacgcaccctccctgcggcacaggaggccctcctgaagggcctctgtatgtaagcttgggacagctagtgcaggggagagagaggtgtttgtgaagggcagacaccctcttcctcaaataggccatctgctttatcatagcacatacctttcagtggtcactggctcagaagtgcttcctttctactttggaaaaaaaatggtagcattccccagagttgagtgaagctgctttatccaggagtgccctgctttcagctaactttggtgggtgatgccaagatcctctgagctctgcctgcttcatcaggaagacggagatcaaaacttaaggaaatgaaaaaggatctgggtagaaacgtgttactgggagactgggaataatctgcagatggagagaaagctgcaatgttaagaattagggtagacgtaaatctgatcctattatcagattgaccatccaggggttattagtgtgattttaatcctttatgtttctggtgggcggtggttctaaggagagtcaaaccacagggcaagaccagagcctctgctcacacccaggagcagagtgtttcccttaaaaccaactagcgaggataccgtgttaagagtcccaaataagggaaggactctctgaaatattgagaattttctcagtgcccaattcctaaacctagtcatgaactgtatgttgtcactggcatctccccagcttttgccttggccaagtccctctcacacatttaaggcaacagccgggttctctaggaaagtagcaaagatggccaggaacactgctcggagtgcagcccggggcccgcctgattctacctctgcttctggctctggtggagccaggggtgggcctgtgccaacactggagggtgggaacacagggagcaggaagtgggaagatccttgctggggaagtcagaaaagtccaagctctgatggttcaaaaccacccccaggrcctctgaccagcaaggtgtccgatgactcccggctttctgagtgagtgggtgactgggaatcttccatgccccggaacagccccagccagctgtgcccgccggagtgagcatgatttgcctccccaggcagcaccaggagagggtgggctgggctgtcagatggtctggtagtgctgcctcagccgggcctgcagaaattcataggtgaggttgtgccgtgtgatgatccccacgatctagggcaaagagaaggcctgagtcaccttcagggtaaaacccgctggcgagaacaggagtgacaggagccggccctgttagtttgtcacagaatgtggaggcctggatagtgcacagccagacacagcttgattgggataaacagctaacgagggctcacacattggaggccaaggggacaaggttagctccaaaaagggcttgggccagctggcatctgaactaaaatgtccttccacagggcacatgctcagcgctcagctcccatcatgaccagcctgcttcacagatgtgcaagcggtggggcccttgaagtctcctgagattatgacccctgccatgcctcatactcaccaccttgcaaagtgacctatgggagtcatttgttacaggtcgttacagtggttcccacgtgtcactgttgttgggaac

SEQ ID NO: 8775 - DNA, 43363 bp, Homo sapiens
agagtagatcttatagaagtggcagctcagccttcccactccttgacccttcagaggcccagggctgctctctgaatttccccactctcttgtgcttctcaggaattcaccgtcccccagctccrtggccagcagcgactcaggaagtacagatgagatccaggatgagttcgagcgcgaggcggatgtggagcccatggtcagctgatgactgaggccctgcgagcctggtggtcttggtgatggggccctgccacctctcctcatggggccaggaaggcccctcggagtggggttcgaagccacaccacacagactttctctgccctcccttctctggaggcccygagggactgctgcttccttccttccttccacaccaccaacgggtgccccgtctccatcccccacccacccaaggaatggtgctgtcaatttctattgttctccacattacaaatgcagacttctgtgcggactttgcagtgttaactgtgccttctcccttaagctgagccactttgagctccaaagaattattcctagcaggtgtttttatacagaactctaagctgagggccgggccaaccggccgtggtgtaatgtggtttctgccgtccgtcccacctgctcctctgattggccatgggctatgccctcccttcctcctgagccagcccagactcggcctggagcttggggtgctctgccaacccccaggaaggagccgcttgcctctgtgagctttctaggcctgggtagggaccaccccaattttctcactccctgaaggagagaaaggtggaaggaagggaaggaggacacattttaattttttggggggatcgagtggcaaagttgaagggacaaggcactgtgaggggaaggcagagcctcactgtgtttaaactactatgcaaaaaacaaaacaaacaacaaaagcagcttgccttatatcattgtggaaggcaggacctctcctgggctcctggcttccccctggagctgggagagaggccggggttagggtgatctgtgtggcagcactgactgggtagtgtgggtttggccgaggttggtcatgaggcyggggttcccgcaaggcactggcctccctgaccgcttgcttccttccggacctctgggttcagggcgggggyggagggatccttgatttccctgataacttgatgttcttccctccctcgccagccaacaatagaggcttagagatctgtaatttctctgtgagaaagtctgaaggggccaggcctggtctctgctcccttctacccgccttgggttaggactgtccggcagttgcctgcttttggctgctggcaggagagaagcagggtgggctgctggcagtgcaggagctggagtgagggccatcctctttctgctcctcgacacacgcaagccgctctcagcagttccctcgactggccagtcggggtattgatctgagccagcatcccccaagacttgaatggcttgagtgggactgcgttgaagggcactgtgtggcccccttccaaatctcagcttggagccagctgagcaggctttgctttattattattttttaagcctactgcagtgggtctgttgccaattttaattttttattgtcccaggagctccctctagtggtcaaggtagcaaaatgtgcccaaggactagaacttgggtccctctgccttgcctggaggcagaaggagggggctctgggtttgactgggattgtggtccccaggggtccgtggcctttaaggctcttctctcttttctgtttcccccacctgtgttacagtcttaaaaatactgtacataaaagatatatgtagagagagagagagagcgtgagaatgtgttagtgactatgtgtgatgtaatttatcacgatttggtggccttcgtcatgagttttttcctttgttttcttttgctgggggcacctcccacgggtcccctgtggcagtctggctgtgacacttccatagtcagcatctcttgttagccaaacagttccctttgacaggtacttggagggacaatggttttggaagagagacggcccttctctctcctcactcacccttgttctaaaggttacagggttcaaacatacctgattcttgttgttattgttgttgaatttttattttaaccaaaggttatcagagccagttgggcttggacctcagctgctaaaaagattttccgtttcctcgagggcaggaaaacatccaccctcgtgggtctcctccgtccagggccgagggaggcattggacaatgtggtatgggagtttcgtgggcagcgtggaagccggccctgggttgttccccaaggtggtgggagggtgacagatatatctttagacttaagactgtaaggcagcagtgttagcatgggagtaactaaggttactgtggttatcggtgtccggcggtattatttttactttcctccttgtatacataggtcatttgtctttgaggactagggtactctagggagtttgaaaactgcaggagccagaaagagatcctggcctgagagtcccttctggctggcttttaatatctgctctcctcttgggagtgaggacttggggcaggtgggtaggagagggaaagccagagtgtgatgggcctgcctcctgggctggttcctgggtccggcctgcctgcctgcctgcctgcctctccaccacatgcttttttcagttaatgtcagtgggccctgcttgtcccctcaccatgagcccacagcttgccaagaaagaccccaacgctcgctggggcagcaccagtcctagctgggacgaattggtccatcctttgtaaagctgtaaatacttaattttgactttctatttctaagcccagtgtcatattgacactggtattttagaattttctcagatgggctctcctgcgctgccctctgtctcctgtttttgggggttttatacaaacagaggattggggagggataggaagactagcatccttttggctccctggttggttgtgaaatacacacacacacacacacacacacacacacactcgcactcctctgagactccgaacagagaaaaaaattattggcaaatcaacacatttttctttctcgtcttgagaaaatgtcttgaggtccctgaagggccaaatccatcgtggactaactctgtgggtagagctcagatgacctagggagaattaaaccacttamgcttggagtgggaggagagggggtggggtgggggagaatataagatgtaacttaagctaaatgtaatctatttataaagcaagagactctcatctatttttatgaaaggaagggttttttaatctagggtaggcagttgtggtagcccagcattttcctgtggacgagacatggtgcatgttgttgctggattgaatggaacccattcctgtcccccggcctcgtcttctgtcctcacttttggtcatccacacccatgagcagcttcagcagagtgtaggtcccacttcaccccattctcctctcctctgacccctcagctccttggaagtcttggggtggggatctgagggggtgggtgggctgcaggaaattcagaaatgtggtgggtgggggaagggacaaggcgcattagggagggaacaagctgggctctggggataggctctgattaattagttactctgactctggtctgccgagatccatttccaacccagttgcgttgggagagggttgggaggcagcagagcatgggtgacagtgggagcacacgacttccttggagcctgggcctttgcgggtcccaggtggtcaggcagctggagcaraagtggaaatggcttaagatgctcatagcccagccccggctgtgtctactccaggccaagcctgggctgcagtccttgctatgttccccccagggccctggggggagggatcagggtgctgggggtttcctaggacaggggtcttcccccttgagacaccaagctctggctctagaagagctctctcctggagtggggagtctggaggggactgggtgggtgcaggtaaagccagattctctctggaagggaattttctatgaatggatgatttccaggctcagggtgggctgtgtgttagttctgagcaaatccctcaccaagacccttccctcccaagccctcaaagaaatgaggcaaagcccttccctgcaagaccccttgtggaygtttttgcatctacctgatttttagccccacccagggagactttataccccatgatcctgccccaccgttgctgttgtctgccagctgggtctagcatcacagggaagggggggatttatactcayggaaagactactgatcctaccggaaaccaacctgtttactgtactgttgtaaatatcatgccctttatatcctgtatattggcttcttttaaataaagtgaaatgtcttagaactgatggtgcttttttttgtttttgtttttaaacagaagatgaatctggtgttgggggaggggtaggaggacggaaggccacagaaaccctcaaactcattagttaattagccataaaataggggatttcatatcacctgttacatttgtagctcacaataaaagctttggaagatgacaaagcaggaatcattacacacattttactgaaggggaagagaggacatgagacatcacaggctcagtaactggcttggcctggtttggaactgatgtccttttaaccacaaagcccccatttttccaggctctccaacgtgcccacaggaggtcaccttcccaggctctggatttgacagtaaccaatgttctagtttttcttgtcaatgggcatgttcagggcaacattgcccaaatgtgaactgagcccacctgtctagggttttctccaaaggtgaagacaaatagccgccaccaattccaatttgctttttgccattcctaatacttggcacttaggtaatctccctctcctactcttcatttaaatgtttacattctcccaaagtacctcaaatggtgtaatctggagaaaaataagtggcttaagatcacgggggctttgtgagttgggtactattacttccgttttacagatgaggaaactgaggcccggaaaggatatgtagtctgcctagtgccctgcttgaggaaccaaaatcagcatgggaactgactcctaagcaggtgcgcggttcatgctgctggaagaaatataaacaaattagaacagagagtaaggaaacgtaacattactttaggaatagattgggtccctgagacctcgtcatcagagaagacttcagaatccaagttttaaatagcattctagtgtttaccaagcacacaacattttgcaaagaaagctgaaatttttacttgggggtaaaaggctcaggaacaactggttttgcggccaaaggctttaaatgaaaagctaagcgttggccagctcaggttttatcttgcattgatcgtaatctgcaaggaagctaagaagctggccggccccgcgcctggagggtaggtggagagcggctgggtcctggccaagaagctggaaggcaggctcattccaggggccgcagcccccgggaagaagcagggggctggccgcgctgtggccctgcggggtcgaggagtctggtagcggacaggtttccagccttgtacaagccaccggcagcccgagagaagtcagtcggactcccatcgaacccggggcgcacgccagagggccggacgcagcgagtccttctgccccgcttcagcacgtgtcccatttcggttatctcattggctctattcagcccctctctgctccgctttggaaggctgccgcaggaccgccccgctgattggttcagaagctttggtgtgtcactctgactggtcgacagagttcacgccctctctcccgggtcataccataaagagaggaggggaaaacgcatgcatttcaggacttcgctttcgggttcccttgtcctgtgttgtgtaatgcccccgttatggcactagaaatattttttattagccgaagctaaatatagtgggactttggctgatcccgagctcggaggacagccggggtgatccgtttccccccgaggatcgaggtggtgcgctctggacggggttgtgcattctcgccgcgcccgggcggacgatccagcgaacagccccgcttctaacccgagatgctgctgccggcgcccgcgctccgccgcgccctgctgtcccgcccctggaccggggccgggtgagtgagcacggggcccggggcggcccgagcgcgcgcctggggcccgggagcctgagagtcactgggcgtcccccgcgccgcactccctccctgccggacccccaagctgcctcggtcaacgccgggttcctcaggggctcccctccgacccccacccaggcctttctcccactgagatcccttagcctcctccctcaggtagtcaccttcctttagcgaggggacccctcttcccgaatcctgcgaccgagtagggtgcctcggtggccctgccggttcccacgctcggaaagtagcctctgtagtcactcacctcactcctaatactggatcttcgcaatttgctggcttcccctgaggggcccttctatttttagcacaccacacatctcacttccccaccctcgtctcacgttcagtgtccccatcccgccccggattccccgagtcctctccttctaccaggatttctacctctctcttttccgctccccacacaccccgccgcccgtttttttttttttttttcaagttaaatgttggacagaaaaaaggattcctttcttcttgtaggtggaataatcatatttatagagtgcttataatgaaccaaatgctggccgggcaattggcaggtgtcttatgaggattaaatgagttaatacatggggagtgcactgaacagtgcccagcacaaaggcagcgcccggttattattattgccacgatcatcatcattatcacctctatttaaacttctcactcctgtgaggcaggtcattattccaaataatgaagaaacccaggagcagttcaggggtggacctgcccttcaaatcccgatttgcaaacctgacattgtggagccaggtgcctggacccttgcccactcaatgacaaatattctcagagcccctccagctcggagctaggtttggagaggtaggtgggacacagaccctgccccagaggggttcctagtctggtggggctgcccacctgtggatcagccccccctcccattkgaggtttgtttgcttgacccctggggctgttagtggcagkgtctttcctgatgagctgtgccctttctgagttaatcagtggccctctcccttcccccaagggatggcatggtggtgctctgagcacawgtgagttgcaacactgctgtgtgtcctctgtgggtgaagaggggataggaaagggcgcaggaagaggacatgggacagaggggttcctcttctaggctgagactggggccacacttgccatactccctgtgtgatcccgtttgcaggccttccctgcactctgagactcaggaagatggagcttatagagtcctgtgtttactgagtgcctactgtgagctggtgctctgccaaacaccctagagatgaggggtacccagggaatttacatggggtggggcctttgaggagttttcggcttaataggggagaaatgcataggaaaaccctccaatatctagtagaaagcaatccatattctaaaagataagcccatgataacaataatgattatcaagcaatcaagcaccatgggcctaacaccgagccggtaagtactgtctcattcctgtattatcatgggaaacgatctgccatcagagatatatgactgaaattacatttggtctaaatccagatttatgctctgaattatgaggcctcctgaattgagaggggaaagagaaagagcattttgcagctggttccctgggctcaagttacccctttgatacagcagctggccgcatgccctagacaggatttctcaacctcaccactattcgcatttggggctacattttggttgctgtggagtctgtcctgtgcactgtagaatgtttagcagcgtctctggcctttacccgctgcatgtcaggggcacccccggccctgacaattacgaaaaaaaccctggccctgacaggaaacacaagttcccagacattgtcagatgttacctgggggacaaaagtcacctccggttgagagccagtgctctagaggaacagctttgatgtttgatcacttgttcatttactcagtgaacatttagagcacacccgtgacatgccatgtctgcatttatggagaaacagtcgcagggcattttcagtgacatccctcagtgtcctacgtgtaaaactctagtcctgagaaaaaccgctgcttttgaggaacgggtataggagatgcttcttagtgttttcttttttgccttgagtgccaggaatctctgctagttttaaaaaatacccttgatacatgttttcttttagtttaatacatgtcaactgtgaaaagtacagataaggcaaaaaaatagaaaaatcacctggaattgtaccacacagaggtacccactgttaacattttgattcatgtcctttaactttccatgaatagatatgcttttaaaaaaaacctcatagaaacaagctcatctgcccatactttattgtagcttgttttttccctttatacacttgtctgccttacagtatgttcccaggccctggaactgtgtctggcacctggtaagcccttggcaaacatttagggaatgaatgaactaatcatgtgagcccttccttgtcaatcgatatttatcacggccagcctcaggacaatcaccataaagtgtggcctttataggtgggcccagggatggcagctggtgacaatgactgccatttacttttcatgtggattattttactcagcctctcagcaacctatgatgtaggggttaccacccccatttcacagattaaacaactgaggcccatggaaattaaggaaaacttgtccgaggccttgagctggtgaacaccaggcctcccaactgactgtctctttcctcctttaaccctgacttcctgtttttttctcaatcaactttaccatcagtatcctcagttctctttggaaacaggcaggatacagattaatagccagcccaggcatgtagtaggcttataagagttcacttctgttccttatttcttgtgccaagcccagacatgactccagctcagcccgtctgacatcagggggcttgtgggccggaattggttactaccgtgtcccctgcagtgatcctgggtggttttggactcttctcaggctacctgatggtttaattttcaaaatatcaaaagcacacaatgcttttcctagtctgcccagcccttggatgggcacagcttgccctgggtcgagggctggcatttcccaccattccttagacattctctgctcttgaactcctccaaccagtggctggggcagtgcctttggcctggaatgtcctgctggccacctcggtgagcccatccagtgctttgtggccttggcaaggcagcttctgtcccttcagtatcctcgtctgcaaaatggggatgattgtattaacagccacgtagcaggtggctgcaaggattagcggtgatgtgatcagtggtttcctggatgctggtaccgaatgcgtgctctgtgagtatttgagttggagaataattaaaacctgtgattatcatcacacttctaaagtagtgaaagcgccattgaggcagtgcttggcagtggcacccctgggagcagcctgcctcctgtgccctgcatctggcccggcacacagtaggcgttgaacggttgctgttgagatggtccagaacacagcatggcttggatcctggctccaactcttggcagctctgtggccccgggcaggttactcaccctctctgggctcccttatgttctcatatggaaaataaagatgacagtagtagtcacctcataggattgtcctgcgtgttaaatggtctcatacatggaaagcactttggagtgcccagcacctgaaatgctcagtaagtgctgctgtggttatgatgatccccctctcccaccaatgggcttcctggagtgatcatcttcgatcaggaatatcaagacagcagggcccagcagtgaaggatggtggcaggaggggaggtatggaactcagatgtcctcggtctcttctgtttattccaattaagtaccccagatgccaaacctcttctgttattattgttggtttgtttgtttgtttgttttggagacagagtctcactctgttgtccaggctggagtacagtgtcatgatctcagctcactacagcctcaacctcctgggctcagtcatcctcccacctcagcctcccaagtagctggaactacaggcgcacatcaccatacccagctaatttttgtattttttttttttcgtagagacggggtttcaccatgttggccaggatgatctcaacctcctgggctgaagtgatcctcctgcctcagcctcccaaagtgctgggattataggcgtgagccactgcgtccgaccttctgttagggttttgaccctgctcacctcaggggatggaaaagacttctccctttcttgcagcctccttaatccccaaaccttccctttcctggcagaggtcatggcatggagtgaagagtccctgggctgagctgctgtgccagtggacagctgagtgaccttgggcaagtcactgcccaccttggggcggcggctttcctcaggtggaaatgaggttctagctgtatggtgaggaggatgaacgtgtcccatcagccccacctgaccatgggcctctgagatgttccaggtgcttcagccatactgtaagtctcctgagtaaggaacagctggggtcaaatcctgctctgtcactcatgagctgtgaccctgagccaggagtgagtaactctgaacctcatccgtaaacagatcattctacggtcgagtgtccctcatctgaaatgcttcagaacagagtgtttcgttttttgggtttttgtttttttgagacggagtctcgctctacctcccaggctggagtatagtggccagatcttggctcactgcaaccttcacctcctgggctcaagccatcctcctacctcagcctcctaagtagctgagactacaggcacacgccaccacgtccagctaatttttgtacttttagtagagatggggttttgccatgttggccaggctggtctagaactcctgacctcaagtgatccgccctcttccgcctcccaaagcgctgggattataggcatgagccactgcgcctggccggaagtgttttgtatattggacttgcttggattttggagaatttgccgaacaagttgagcatccctactcccaagttccaaagtccaaaatgctccaatgagcatttcctttgagcgtcacgttgacactcaaaaagtttcagattttggaacatttcggattttggatttttggatcagggatgctcaacttgtcatgcgttcctcatacgcttatgtggtggattcagtgagatgatcctgtctcacttaggttaatgcttggcatgtggtggcaagtgcttgacaaatgttgcctgatgtttgctgggcagtggctgaagcagctcatccctggcattgggtctttctttcttttttttttttttgagacatcgtctcactctgttgcccaggctggagtgcagtggcacgattttggctcactccaacctcttcttcccgggtacaagcaattcctcttcctcagcctcccaagtagatgggattacaggcatgtgccaccatgtccagctaatttttgtatttttagtagagacggggtttcaccatgttggccaggctggtctcaaactcctgacctcaagtgatccaccctcctcagcctcccaaagtgttgggattacaggtgtgagccactttgcctggctgggcctttctttccctccaggccccgccctgggccctgcactttctctgctcacctagtgttgcctttatgtcggtgatagggaggattagccttatcaggctccagataatggctggaaaagtcaggaggctgcatgaagcaaagataatttcctttctatttctcctctccttgtccttggccacccctcaccttagccactggggaacccaaggggccagtgtccagccccaggtgatagcagaagagcactggccttggagtccagtcctgggggcctggtgtcagctctgacactcatgcattgattgtatttctcaggtgcttactgtggccagtcagtgtgttaggcttggggtgcctggtggtgaatgggatgggtacgggctggctgtgtggagcctgtggcctggcgggcacacagatggtcagtcagagctctataatagggttttcactagtgcttccagaaaagtctagagctatgagaggaatccgataggagccccattccggctatgtgaggttggaccagtggaggacatctcaagcagagaggaccccagaagagaccggggtgaccggattgcaccaaatggggcagggtgatggggaatacatttggaggccttggtaaggattctgatgtctttattttagaagaaatgagaagccactgagtagtttctcactgagctccccactgtgccatctctctgatgatcagattttcatgttaactttggttgcggtgtggacctgagtgacttggagactggagcagggctggcatggcgtgagtccaggttgaagtgactagtacctcggacgaggtgtcttgggcaaggtggagtctgggccctctgtgtcttttcagtttttccctctatagatttctgaagctgcattggctggcccrcagctccttgcaaccctgacatctcctggtgcagaaggtgaaatggtgcctggcctttgtagatcagatcccagtacttgcaaccctgacatctggtgcaggaggtgaaatggtgcatgtcctttgtagatcatatctcagtacttgtagccctgacatctccygccacaggaggtgaaatggtgcatggccttcatggatcggatcccagtacttgcagccctgacatgtcccgctgcaggaggtgaaacggtacatggccttcgtggatcagatcccagcatttgtagccctgacaacttccagtgcaggaggtgaaacggtgcatggccttcgtagattagatcccacttgtagagggtgagggggaccaacttgaggtctcaggctcagggcatgagcagaaagggcactgcagattttcagggaaacctgagtcagattcagactctgtcttgtgccgccttccctaagtgggaggactgagggctgctctgagaaaggttgggttggatccatatctgcctcccagagccaggcacttcctgggtgcttggaaaacgcatgctgaataattgagtgagctgttattgacctgatccaatttatctctgcatcgttgccatgtggaataaatgtgtactgactgcataaatgcgtgaatggatgaggaatgctgtcctgccaagaaggtcctcatggatcctcagagaggccccaagtcctgtgactgattcatctctgccttcaccygagcagccagtggatggatactcctgttagcccaaaattgttcatgaaccaaaaaaaaaaaaaaaaaaaaagaaagaaagaaagaaaaaagaaagcactgatgggtgggagtccttaggttatttttagctgcagtcgactcaggctgaactttgaactagtgtctgttctccaggccacactcagactgatggacggacagctgggccagtgcttggagacttccaggcacagggaaagccgtgggggcatgtgatcctgaggtcacagtgggcatctgggcctctgccctgtggaaggaggagggaggcctgcaggatctctgactctgacatttcctgggagggaacggagaaaggagaactggccgctactacatttatttatatattttgagatggagtcttgctctcttgcccaggctggagtgcagtggcacgatctgggctcactgctacctctacctcccaggttcaagtgattctcctgcctcagcctcctgagtagctgggtgtataggcgcgtgccaccacgtctggctaatttttttgtagttttagtagagatggtgttttgccatgttggccaggctggtctcgaactcctgacctcaagcaatccgcccacctcagcctcccaaagtgctgggattacaggcgtgagccactgcaaccggcctactccgttttaacctggggatggaatatggtgctgtgtattcctccagcagttgctgagtacctgggccagtccccgaggctgtgatttttgggggcatctgggagcccatttgtctctgaaagcctgatctactgaaatagcattctgagacctttacagttttctttggaaagcaagagcaggaggggtgaggaaaggccaacacttgtaatcctcctgatggccctgcaaggtgcatcatgtcaaccttaaatagtgagattcagaaagaaggattaagtagtttattcgagctcagaacttgaggatggccaccggggagcatagattcaagttacctcgaatatacactccgattagctgcagtaacaagtgggattttaaggtgcggaggaaagaggcagtttctaagtcatttaccaaaaatttatattaaaataatataagctaccggctgggcacagtggctcacgcctgtaatcccagcactttgggaggccaaggcgggtggatcacttgaggtcaggagttcgagaccagcctggccaacatggtgaaaccccatctctactaaaaatacaaaaaatgagctgggtgtggtggcgggcacctgtaatcccagctacttgggaggctgaggcaggagaattgcttgaattcgggaggcggaggttgcagtgagctgagatcgcaccactgcacttcagcctgggtgacagagtaagactccgactcaaaaaagaaaaaaaaaagctactgatttgctgtgcattgttctttgtgtgacgctttccaggatcatgaagttaatggatgaggcagctagtcagaaacaaaatgccttgaaataattgccatcgggtgtggatgcaaagggcatgactcaggtcccatattcgtgtctccctgggcctgatacattttgcatacttcacatagctcacrctgctctgagctatttttctcttttcggtagtattgtacccattttccaggtgaggaaactgaggctcgcagactttctaagaatgcactgaggtcatggagcaggtgtgagctttgcctccggatttgtccacttctggggcctgtgcttttcccatccactgggacctgggctccaaagaggggctgggacagactcagttatttggagtcccgcttctcggctgaaagagttgatggtgatatctggctcaccatctttggtgggtgtggtgctgttgaggcctggagcgcagcttgaatgcagggtcaggagcttagctgaggtccctgtcagaagcttccagatggtcccaggggattgacactgccttgtcccttcctgagggactgtggagactcgtggctgcctctycattcttctcatgatggtagatggaagagggccgtgcagattttaatgtatttatcgttatcaaatctccatattaaccccatgagggggtgtcagtgttttakggagggagggaaactggcttcaagacatgtgacttgcccaaggtcacacagctagtgggaggcagagtgggggtggggagtgcagagctaccggctcagggtggaggttggtggggaggggaggggagtggagagaaggtcctatgtgctcactttacctgtcaggatcttgggtgccctgcccctgcctctccctctccctctaccacgcaggcccctctcagcccccccccgcctccttctacctgggatgctcttcccagctcctctcaagcctcctttaagtccctctcagggtcacctcctcagagaggccttccctgaccaccctggctgaagcagccctattctcccccttgtttgccatgctcaccatctgcggttaccttgcttatttcctgaccaggcctcacactgaaggtcacctgtgtgcagccaggggcctcgctgtctctgtcactgctttatctccagggtctgagacggcaccagagacccagcaggtcctcagtcaacctcaagtcaagtggaatgaacacagggcctggccacactcctttggttttgtgtccttccttcaggcttcccaggctgggtctttgagccccagactccttctggcccccgacactcatagccgggccagtctgtctcccatagggcaaaaacaatcccgcagaacactagcctcaggccacgtccctctgagaccatgatcagatgagacacaataagccctcttcctgatttttttttttttccttgagatggaatcttgctctgtcatccaggctggagtgcagtggcgtgatctcagctcactgcaacctctgcctcccgggttcatgtgattcttctgcctcagcctcccaagtagctgggagtacaggagtgggccactacgcccagctaatttttgtatttttagtagagacggggttttaccatattggccaggctggtctcacactcctgacctcaagtgatccgcccaccttggcctcccaaagtcctgtgattacaggtgtgagccaccatgccgggccttctcttcatgatttttgtctaagcacggacaaaaacaaggtctctgtgccacccacaaagctctgcacatcttggtaaatgttccttttttcccagtcagcctcacccccactttctgatggcagccaatccagagctaaccgtggcttccttaaaccctccccaagtcaccctgccaaaccccatgggtttcctaacagcatcttactgagatgccctgtggttccctacgctgtgtgttttccctcattgcgccgaccagtgaaccccacctgtgcacttccagctgttcgggttgtctggggccattgacaccagagagagatggtatctgggccttctggactcaagtgcaggtttcccctactcttgatcttgaactagtcattttccttttaggaccaaaatgaccttatttctgtagagaggtggctggtgaggcccgtcctatgccacggtagatgggaagtttgtcaatttcaagtgccctttgggcattagttgactttgtcatcatcattcttctcatttacagagggggaaacaggcctgaaggggaagccccacagctgggaggtggcagggctgaggctccagctctggaatgactgaccccagcgtcctagctttgagccacctgacctcccaccttgtgaccctcagatgtggtagggggtggtggaaagaggtcagaggatttgagcaaggagttcttgagactcagtgtcctggaatcaggcacctcacccccagggccagccctcccggggctgtgagctgagctcarggcagctctccaagttcatggtccacatcttggacattcctgcccagccagagctctcagccctttgtgccaaggggatctcagctggttcacattctgagactgtgttctggaatgtgctgccctttcagcttagagagaggagtttgggtctttttgggataaagcctgccttgtgggagaagaaagggagagtaacgctttgcatgtggaaaatacttcaacgtggttttgcatctgtgtgtttaaacttcaaacaaccgcgtgagttcggtgcgattattcttacttgatagacgtagaaccacgttcacaggaggcaactcacaggctcaaggacacacaaccgtgggactgggacttgaaccttgggttgtggacccccaaggtgggtttttgttgttgttttgagatggagtttttcgctctctcacccaggctggagtgcagtggcacgatctcggctcactgcaacctctgcctcctgggttcaagcaattctcttgcctcagcctcctgagtagctcagactacaggcacacatgccaccacacctggctaacgtttaaaatatttttagtagagacgggatttcaccgtgttggccaggctggtctcgaactcctgacctcaagtgatttgcccgccttggtctcccaaagtgctgggattacaggtgtgagccaccatgcccagcccaaggtggggttttgaccccccactttctagttgcattggatttcaggctctgggtgcccacctaggaccccctgtcggaggtagaggggctggggtctggtggtggggccgctgctgacctctctgcctctgtcccctgcccttgtgttccagcctgcggtggaagcacacctcctccctgaaggtggccaacgagcccgtcttagccttcacgcagggcagccctgagcgagatgccctgcaaaaggtaatgggagggtgggaggcacccgagaggtgcagggcatggagcagaggccatccccagcagccctgagatagcgcyccgtgcctgcagccatcacccgcttctacccttgctcccagccttgggtggaagcctgggagggctgtgggtctggagtgtgggaacagctgggaggaccaaggtggcagcctggagctactctggggcttctcaggccaggtcagatgtcataaacctagttgttttatagttaaacatgttttccagttaattgccagcattttaaaaatcatgagatttcatataagtttcaggtgcagtttttttatctctgtgtcatgggtagacctcaccttcctgcagggtgacaatggctggagcagagtccggctgtccccgagggcagcacatgttctctgatggccaccgacctggcctggcccccttctcatttctgtattgcctgggcacctccgtctgtggactctgcgttagggttttagatgggaggaagcgaggaagksggtgaccatacccactcttgtccctctccccaggccttgaaggacctgaagggccggatggaagccatcccatgcgtggtgggggatgaggaggtgtggacgtcggacgtgcagtaccaagtgtcggtatgtccagcgggtgggcagrgctcagcccctcccctgaatatgtgacctctttctctgacagctcgtaagcttataatgtgtgggctctgacttcaaggcctttatagtgcccctccccaccccagattttgaattctgtggaccagtaaaactcccaaagcaaaggacggcacccacactgcatccagcccatagcggcatcctgtgtctgggcaagaaaggccatgagggggccacacagcatcttctgttattcctcatagatttcttgccaagggggtttgggagctaatgacaaaaagctgggccccgggccccgagcacctcagatggcattggcctaagaagcccccatgcttggagtttatccatccagaaactggcatgcactttacgtgggccaggaaactcayaggtctgtgatttgagggagartaaaaggtcagcccttttgcaaacagggcaagcacattctggctctgtccggctgaaaccctgggcagacgtgtgcagggggaggggtgactgagggggaggacccaggtcccccactctgaaggttcccaggacagcctggggcaggagttgaccacagcagtgtcctggagctctagttgctgggtcaggactacctggagctgtccaagcatggcctggggtctgcaggcattggccaggtcactctgtctgtcactgggtgtgtgtgcaggtgccagctgacagcagcacctgccacccagctccctggttgtctctgtagctgcctagagcttgccctcacctgtagctccrcaggcgtctgaggctgcatggcagctgggatttttccaggcagcgaggctccggcattctgataagcccctgggtggatactgctgattttcatttcccacattgccttgccgacctggctggagattctggccatgtgctgatcactgtggcacgagacatttggggttctggggcatgtgagggcaggatctatgtttgccgggacatagtgctgacggggttctgcagtccactggggcccaggtcgcagccaccttctctgcccttaagcatcacaggccaatctcaggtgtggcccgaatacagagtgactgtgccaagctttaacatgaaggagaatggtcactttctactcaagcctagaccagcgccggccagtagaatttcctgcagtgaggacagaaatgttccagatctgcattgtccgttccagcggccatgagccgccacgtgtggttgttgagcatgtgaaatgtggctcgtggctactcttttagacaggaaagctccaataacccaccagaagacggataggtagcaaaagtgtcagctattacgatataaactatcttgccagccctaggaaggaaagaagtgaaatttctccctgcttcattggtcatgctagcgttcaccactgccgggcattaggttttgaagggaagacaggggttaaagaaagacacacacacagagagagggcagctgaaacagcaacaccagtatattgcagaaacctgaggaagtgggggaccagcttaatgccagggcccaccgctgcttacaggctgaggtactcatcggtatgggtgagacgggtctgggcagtatggcttgctgcctggcaggatattgataagatgttgttatgatcaggtggtttggccctctccggtgggatgtcatcgtggtgttccttgtacctttacccagcaagatatgatagggatggtttttttttttctgagacggagtctcgctctgtcgcccaggctggagtgcagtggygcgatctcggctcactgcaagctccgcctcccaggttcatgccattctcctgcctcagcctccccagtagctgggattacaggcatccgccaccacgcccrgctaattttttgtatttttagtagagasagggtttcaccatgttagccaggatggtctcgatctcctgaccttgtgatccgcccgccttggcctcccaaagtgctgggatcacaggtgtgagccaccgcgcccggccaacagggaagtttctttaggtgggccttcgtccgccttgcggtcaggcggctgagccggatggttctcatggcctgagctcctgtgaaatgtttcacttggcccgaggtctgcaaaatagcggggagctgacaaaatggtgcggtttggaccaacaccaggttgtgtttataaatgtttgttgaggatcttcctatttagattagtaaatctggggcttaggaaacaattgctctgtccatgatggcttcggggcagggcggaagtcccaagcatgtcacaacaccggtgcattcttttgggcctcacctggttttgttgcccatagtcgcagcctcatactggaccaaagaattttcatccatgatcccctttggttctcctgtccatgctaagagacagggagggcagtccccatttcctagatgaagagacttagggaaggaagtgagcttacctggggccccacagctagtaggtggcagagccaggattcgaacccatgtctctctgaccacaaaggtccgtgctttcctggaaagaccctggggtctatgcctttctcctggactctgagccttctggagaaggagccatgtcttactcatggtatagcgggtacaccagcacccttaacagggagcaacctgtgggccgggcactggggagggtttcatgggagcgggggaggggggacagcaggcgtgtccaggactttcctggaaaaccggctctgagtccagtcctcttcatccttatcctggcacctccctcccgggcaaggacctcaytcttctctcctttcagccttttaaccatggacataaggtggccaagttctgttatgcagacaaggtgagtgagcctgtgtgcctggtgacccggggttagggttgctgcccctgctctgccctgccagctgctgatatggygggggcagggggcatcagttgctgtgtccttctttggccatggtgggtaggtgggcagggggtggctgacactgagggagtccctgggtgatgtctttgactgggccaggcatacaaaggttaacttgagccaaacacaagctgcctcagccagggctgagacattcccagacatgcccattgtggtggggcagaccttggactggggaggaggtggattctggaaggctgagtcagggcaattggagacaccattgatggaaagctaggccaagaattggcactggaaagggccagcaggaggggctggggtggctgggggtccaggaactggcattgtgtggcgatgagggcagttggggtctgggaggccagcagcagagccgtgtctcaggctccagttgacctcaagtttctggatggtgggttaaggggcaccaggtcccaagaataaggtaaggttttgattagaccatgagagaaagtggagccagtgtaacagctgcgggactcagtgccaaggcctcggagagctgaccaacctggccgggcccttcaggcttcagactggcagccactacaggctctgatgggacgctgttgttggcagctatggtggcagggggctgagggcccagggagacaggcattgtccccggatggaagagagtggcctcccaggtctctcctccctcgctcactccccagggcctttcccgctgcaggtggcagtccccaacctctccctctccctttagagcctgctcaacaaagccattgaggctgccctggctgcccggaaagagtgggacctgaagcctattgcagaccgggcccagatcttcctgaaggcggcagacatgctgagtgggccgcgcagggctgagatcctcgccaagaccatggtgggacaggtgaggtgctggtgggcccgggtgggtggggcggggtggggtgggagtcaggtgtgccctacccatggcagcagacatcagctgaagcgcttctgggtcctaagcccttttggggacccagagatgtcctcaagggacaaggcctaggagctgggatggatgatcacagattattaggcgagacagattgtgcagagcccatgtgtcctgcctcggaaatgtcccctctcctccatccctctgtcctcgctcctaggcctttgtcatgctttgcctggactggtggtggcctgcactgtctccctgcctcctagcttggtcagcccctcgccgccctcagagtggtctttccaacacctccaggatgttactcctggcttatgacccacccagacctctccaccactgagaggcaagtcccaagacctgagccccatacccagggcccttctgcccacctctgtccagctcgcccactgctctgcatttccctgccaagctgtcctgcccatagtgtagccatttggcacttagcaggactccccggccatggcaggcatcctctctgcctctgcccacgtgtcctcctgcctggaatgcctgctgtctcttccgtgctcagtgaactcttacctcctggtccagcccagatgtcacccmctccgtgagacttcctgagccttctccagccgaaaggactattcctgcctctgtttccccagagcatgttgttcctgcatcagttacagctcagattgcactggagtgtattgagttcctaggtactgcccctttacaagctttttggacatagtaaacatgtcttgacattctcggtctttttctgggctttgcatgatacctttcaggaggcatagcaagcccctgatcaatggttttctctgcacagagctggcatgacagctcctcaccctgctaaatgcaagttgagtgaggagtggctctagcaggcagagtgtgcgggggacaggagtcgagggagaaagggttatttcaccacctccaggacctgagccctacgctgccaactaacctgggttcctgaagggtaaattgcaggagccagaacccaggctgctttctggatcaggcatttgccactgcctgctcctcggtccccatggtgagcrccccctctgctgcacagagctggtatgacagcccctcakcctgctaaatgccttcttagattggctcagcagccctctggggtgggcgtcagctctgcgtgttcctggtgagccgcacgttgctgggaagacagtctaggatcagtttaggctttctctgtatttggcctaagactcaggaacttctaggaagcaaggtacacatcttagctcagcttcatgggctgtgtgtctctaataggtcgtgcacctgccagtgaccttgggtgccaagaggaggccacgtcaatctggaaaagccccgttcttggctgtccacagttcttttccctgcagctcacatttgctgttattaagaattgacggtttaagggaatcacagtcactcgcctcttggtttttggcccaaactaaccagcaaggccgaacatcattcctggggaaggagccatccacctcccacacaccgagtctctctcctggttttccagtgaccaatctccagctcatgctaatctgcccttctgtctggaaggctctgatcctgaatttagtctgaggcttgaccatagatcctttgccatgcaccaccattcagagttgctatgaaatgaagacagtgcatggcaagtacctggcctgctacagaggatcactaaaattcttctgatccccgtccagcccagagggccggctacaggaggtgctagctcaggggcttgagaatcctttccccctcagcccctgggatgggacctggtgagccctccaaatgtttcctggtccctcctggggccyggctcagtgctcgctttgggcacagcgtcagatgtgagaagaggatggacaggaggctgttggctgctcctgacccccggccctctgccttgcagggtaagaccgtgatccaagcggagattgacgctgcagcggaactcatcgacttcttccggttcaatgccaagtatgcggtggagctggaggggcagcagcccatcagcgtgcccccgagcaccaacagcacggtgtaccggggtctggaggtacctgcaggagrcagtgggcgagcaggcggggcagcccaatgccatgggcctgatctcaccgctgcctccttccccagggcttcgtggcggccatctcgccctttaacttcactgcaatcggcggcaacctggcgggggcaccggccctgatggtgagatgtgggcacaggtgggacagcggcagctggttgtcctcctggtcccaacagacagacagaggccacccygagccccttgggtctcagcctagtcatggggagaggcacagaaggtggaggcagcttggggctgtgggtaggctttgggaccagagacccagtttgaatcccagcgtcgtgcctctctgcctgggagaccctggcaatccctgaacttctctgaggcacagtttcctcatctgcaaagtggaaataataggaaagcctccatgactgggttgtgaggctcaaatgagacacatccagcagcaggcagggctggcccggagctggctgagtgttggtggctctgttgatgatcattaccgctgaccttcagtgctcaccacgtgcctgctgctgtcaagcacggcatggagatgatctcatttcatcctctcagcagcttcgagagggagttgtgactctgcctctttgccagatgacaaaactgagacacacagccgtgacttacttggcaagactgagtgactagtaaataaatgatggagcagagaaagatttggatgtagtctctctcggggttgatggtattcaagtcactcctctgccattatcggagtgaggttggctattactggatgaagtcccaggcctgtgggggaggcgcagcccagctcccagacagcctgggtgggagaggtccacatagttgtcgggaaccccgagccccagacaggggcactggatgctgatgccggagtgtgtactagggacatggatggggacgtcctcatgcatctgtgcacagacaaacacggtgcatggccaggcgcccacgtgcctggctgctgcacatgcctgacccaggacatgtgctgagagagcccgtgtgtacttgccccgccgcgcccggtgagcactcagtgactctagcagtaagaacagacctgcctaggtgatggcaggaccggttggtgcaggcttctggggaaagggagccttggccagagcgtggggcagattgggctgtgccgtggcctccttggcagggacttttggagatagggccagacgccttggaggagtggggtcgggtaggggatgtcctggttggcacagagtctggtggttccaggtgagggacaaccatgctgtagggtagggtggggtgggggttgggggctggtggcgccatcctcatgcatcactgaaacacctcccgggcagggcaacgtggtcctatggaagcccagtgacactgccatgctggccagctatgctgtctaccgcatycttcgggaggctggcctgccccccaacatcatccagtttgtgccagctgatgggcccctatttggggacactgtcaccagctcagagcacctctgtggcatcaacttcacaggcagtgtgccgtaagtccctggggatggtgtaggctgtggtggctaggggacgttcacaggcaaccctgctcacctgctgtctgcctggggatggggctgtgaacccaggggtcatgcacggactctactcccttacttgctgtgtggctatgagtgagccacttcacctctctgagcttccatttcttcacctgtacagggagtgattatccttaatttgcagagtcattgcaaggattaaacatgttaatgaacaggaaagagcttcgcagactggaagtgcaccctacagctgtgggtaatattgatttcagtgctacctctgctactggaaagggcacaggggagcacagaatgaactggaggagtcaggaagccttcctggaggaggtgacatctaagcagaggagttggccaggcagaggggaagaggcaggagaagaatatatatgttgggagagggaatagcacatacaatgttgccaagccaaaaacttgtgctctggggcatggcaggatcctgtgtggctggagtgtggagtttgggggcgacagggcaagagagtgagggcagggcatggtttgagttgaggtaggggaggcaggccactacctgatctcgaccatccatgcactcactggctgagcaggaaatttggagctcacactaaggctcagtggtgagcacacaccagggacaaggtcccggctctcaggctggaggtggcggcagggagtggttcagtgaccataagatacttaggagtctgcaaaggtgtctggcctttatcctgaaggtgatgggagccatggaaggcttcaagcagggagagtggctgagtcagagttctgtgtcaggcagagattgcaaataatggcccccaaattggatctggcaagaggctctactttctttgactcctaacagtgatggcccaactttgtataattgggacaatttcatagataaatccaaatattggcctgtcttggtcccctggacctggatgctctgatcttgcatttcctggtggtaccactggctggaagtgggtgggtgccctctggctccctgcatacctgatccacgctgtttcctttccctgctggctcctctgggcccctgtgttggcaccctcattctcagtgatctctctgtgacctgatgcaggagactggccagggactgttgacctccagggaggggtggtaggggcttgaaccaggggagagatgggggatgtggagaagggggcaggttcaggtgagaaggatgcagggaggcacagtggccattgcctgtcctggagttggggttggggtgcgtgtggggatgaggggggttgtcagcgagaatgttcaagatgggcacctgggagggcgagcgggctcgggggaagatgaatctcctgttggtcacttcgggtgttatctgggtggagatgcctggaggcagccagacgccgggtctgcagctcagggtccttcttacctcctcttccaggccccaggctctgccacccccttccccgcagctttgctgggggtgggagtgggtggtggcagcgttagaactgctgagaagggcygttttccaaaaggcctgctctgccagccacgggcccctgggctccccgcctatcagcgggcggagcgggcctggaccccattctccacgctctgatgagcagcgggsttaaaggtgggaaggccataaattagtattagctactgtgtcgctggctcccgggtgattagcatttttattgttttgtggtgctgaggttggtcacacttggagcctggggaggaggcgaggccctccagggtggtggcttcgggcggggcctgagctccctctcccaggactctcctyggtttggcctctcaggcctgggcgctgggcttgggggggatccttcgcagaccacagcggggtctgttccctgccaggtacctgcagtgtgcccagcatgtcttaagcacatgcctcacacttgaactcatcacaaaacaaccctgccaggtcaggattgttctccctgtttcccagatgaggtgcagaattcgaggctcagagaggttaagtaatgaacccaggatcacacagcccttagtgtcctcctggctgcagaacatggacctcctctgcagcatcttgctgcctagccccccgttgcccgctccccgtagtcttggaatgcagcctgttcccagccgccatccccgacttggctcccacctcctgctgggctgcccccggcaatgctcctccctgggcttttccgcccccttcctctggcctggctccctgaaccccaccctttctcctgtggttccagcaccttcaaacacctgtggaagcaggtggcccagaacctggaccggttccacaccttcccacgcctggctggaggtaaggcctgcctcacctcctcctcccgtgtggccccagggacccctcccctggccattatgaaagaggagggaggtagaggggatccagccacaagtcaggtggatgaaccatttcaggcmccagcactgcccagtagaactttttgtsatgagggatgcgtccagtaccttcactctccaatatgcagccaccagccacacatggccatggagcccttgaagggtggcctgtgcgactgaggaactgcattatctagttttctttcattttaattaagttawatcttagtagccagtygtggctggtggctgccgtgtcgggcattgcagctgtaagcggaggcaagtgcaaatgcagagaccagaagtgggaatgaacttgtatttgaagaaacaaagcaaggcccatgagtagggagggaggagggctggtaggagaagacgggctgagacgtaggcagggctggaccttgttggcatattaaagttttcccacaaagaaacagtttcatggtcaaggaaatttggcatgtrtggtgttaaagcaaaatggactcctcccgtgcagaacttctcagagccttgaatgctctaatacgcatggcacatcttcaaggacaaggtctgccatgtagtgtttcccacacgcattgggccatggaaccccrtttctgcaaagacccccatggaccaagtgttttgtggagcacattttgggaatgtgctgaggcctagagggagggagagttgcagccagcacgtgaccagcagagctgggaccggtggtccagcatgtttctctgtggcgtgaattggggcccactggggagtctggaccctgttcctggactggtgggagttcggatgggggtgtcagggaaggtgagcgctcctcagggtcagctgtgtggctttctgctctcagagcctccttccctgcctccctgagggagagaggccgctggttaccactttccaacctggagcaggtgacttcatctctctgtgcctcagttttcttggcttgaaattggggatagtaatgggaggttgttgtgaggctttggtcagacaaagcacagcgtacttcgtccagagttgggcagctgttaagtgctttcagctgctgttagctgctgcttcccayggagggaggaaactgaggccgggagagtgaagtgacctgtctgaagctccctcccactggggaaatgggggagcggtttccagcacgcgtggggaggaggggcccaaccctggcagccgacatagggtaggctccaatgtccctcgtggacgagggctcaggagaacctcacaaaaagctgtgcccacttctgggaatggctggctctcgggggccttgggttctcatctgtcctctgctgttgtgttgggtagtttcagttttcccatcagtgtaatggggctgttggacctgatcacctctgatgcccttcacccctccctgggcctcagtttcctcatctgtggagtgggagaatgggcctggcccgtgggtctctgggatgttggccagcgctcactctgagcctccgcccgctctgggctgctccgtgctcgtgttggtcccgggccatggatggcgtaggtggtgytttgggcccctgggcaacygggggagccagctcctctggtcatttccccacccccgacccctgtagagtgcggcggaaagaacttccacttcgtgcaccgctcggccgacgtggagagcgtggtgagcgggaccctccgctcagccttcgagtacggtggccagaagtgttccgcstgctygcgtctctacgtgccgcactcgctgtggccrcagatcaaarggcggctgctggaggagcacagtcggatcaaagtgggcgacgtgagtggcaccgtcacccccgccgcggcccagcggggggctgatgggattgggtccctgggaggctcctctgcagccggggctggggtgtgcggggaggggtctcccttggtctcggcctgcagtgactcgtctcttctggcgcctcccttgcctccagcctgcagaggattttgggaccttcttctctgcagtgattgatgccaaggtacggggtgggaagtgggcgttcctgggtgggggcaagccctggagtgggtggaagagggaggaagagatacagggtaccctgacccagggcatgacccagccccactgctttgatcaaggcagctcagcagccacacacgcacctccagcttcagaaagggcagaatcagccgtagccagacaagagctcatcttgcggccaccctggaaccaggctcagcgagctcctaatagcatttgcatgagtgcatgtacacgtgtgtttgtgaatgtgttcatatagggctccgtgtggctccacatgtaggtctttccatataaacaygtacatatccatttgcacataagcacacacacgcatatgtcrataagtccacccacacgcatgtacatggagaaggcatgcagatccctacatgcttagacatgtgaccatgcatatgcctatatatgcattgattgatgtgtgtctrtgtttatatgcgagtgcacctgtagtactaacacacgtacacttgtgtgtgtacacacacacacacacacacacacacacacagtgttcatgtctgtccttgtctctkctgtggctcagccagaccctggcttttgcccttggcgtcccctacccctgcccctgtttcaggagttgggcccttcaggtgcaggtgtttcggggtgagtgtgttgtgggggctgccgcagggatgccttcccagcctcttagacctccctcctccctgcccaccccagtcctttgcccgtatcaagaagtggctggagcacgcrcgctcctcrcccagcctcaccatcctggcygggggcaagtgtgatgactccgtgggctactttgtggagccctgcatcgtggagagcaaggaccctcaggagcccatcatgaaggaggtgactggggtgggcagcctggggtccagaggaggacartcccaccggagcacagcacacacacagttctcctggagacattctcccatttcacagatgaggccctaaagggagaccctaaaagggaatgcctccgaccgggagagagtagagccaggttttgagctcaggctgcctaactccaaatccggggctgtgtccttgaccctggctggggtctgagcatttccagtgccctcagcaaccacgtccactgcagccatcataatggctgacactgatagacttttactgtggggccrgctgtggctgagcacttggctgagatgacgtgggtgttactgttcccattttacagatgagaaactgaggtcaaggcacttgcccaagttggtagtgcagggctggagtgtgcctgagaagatcttccccccagccccttggtggcagagggaaccatgaacccttctggagggaatggtatctctgggcaactctcatgccagctgctgctggaagcctctgggacctggacccttagttctccgggtgtgggtttggcagggagagccagaaaatgtttgcatcttttgccggcttgtggtgggatggacaggacagggagctgggcacgttgctgtcctggagggaacccaggaggaggcgacacctgacccttcttgcagacactgaagtgtaaactgaggcccagggactggggagagggtgagccagagcaggggcactgggagggctcagggccctggtccctggtcccgtggaggrtctgacgccggggcctctctcctaggagatcttcgggcctgtactgtctgtgtacgtctacccggaygacaagtacaaggagacgctgcagctgrttgacagcaccaccagctatggcctcacgggggcagtgttctcccaggataagtgagtggccaggccgcagccctggtgctgtgctccgggtgtcctgtcygtgtccccatccccacctcctggacgtggttcccagtaataatgctgcccctaccttctctctgtcccctcccctcagcccagacaggcagccagggctcgccacatgggcccacagcagcaggctctttgttgccggtactggtggtgccggtgccagggtgccactggggaccagtggatctgaacctctaggggcagggctaggaattggtgtcttcgactggctctgcgggatctggtgttgccccactgagtgaggtgattgtcccatgctacaaagcagggcaggccaggggctgcagaggcaggattcgaacctgggtcacatgaggctaaacttgaggcttcgcctcttctttcctccgtggcactggttgcccccatgtctgcctctatgagaaagtggaggtgagcttggagagggaggaagggtgtgggcctgggagctggagtttccsctgctcctgagggacaggaacattggaccaggacaggccactcccttcaacttcgcagtagccctgtaaygaggcgtgccaagcccctccccagaggaggaagctgggctcagagactgggtaacctgaccgaaggcccacagccaacagctggccagcatccctcatccctgactcggcctcstgttgaacctggaaagccagtgtgggctggagcagggstgttgaggctggagctggggctggaggggagatgagctggttgctctgtcaccactgctctgctttgtagggacgtcgtgcaggaggccacaaaggtgctgaggaatgctgccggcaacttctacatcaacgacaagtccactggctcgatagtgggycagcagccctttgggggggcccgagcctctggtgagtgggtcccccttcccacaggggagctgagttcctggtgggagascctagatgttacrtctcgaggggcttcagagtaataggaaggataccatttactgagcacttattgtgggccaagcaagtgcactagctcagggtcctttcagcaaactcgtgagcaaagggactattcttcccattttacagaggaggaaactgaggctcaaggccacatgaccctggtgggattgtaattttggctccagcagccgcactttctgcaccatagccagtgtcccttaagtccaacaacctctacttcacaatggggaactgaggctcaggaggagcaatggcttgccaaaggtgactgctcctgagtggcagagccagggctgaacccaggcgtgctggggtttcccacaccgaccagttctccagctcttgatggatgctggctgggtgtcctacagtttaacttgatgctcactgcctggggttagtgcagaccccacaggttaagaactcagtcccgtaagactgaycccccaacttcagatgccaatcacaagtactgggaccccaggttacccacaccttgtctgactttgcgaygcattagaagctcccatgatgccctcttgagttttgatacgttgttagaacagctcacggaaccgaggggaagcgtgcttactattacccatgtattgcagagggtattttaaaggatacagatgaacagccagatgcgcagacacatagggcaaagactggaagggtcccyggcakgggcaccgccgtccccctggagttcgggctgtgccacccccttggcatgtggacgtgttcaccaatctggaagctctcccgaccctgtccttttaggtttttatggaggctgcattacacaggcacgattgattcaatcattggccattggggtcgactcaacctccagcccctctgccctccctggggctgaaggttccaagcctctaatcacagggttggttcctttgccaatcagtgccatcctgcaagagccctcattagcataaactcatgtgtgattagaaggggcttgttatgaataacggaagacactcctttcacccccatcactctggaaattccaagagctttaggaattctggctaggaaccaggggtgaaggctagatatgtacctcttatggcaccccaggaccatgccaagtccctgcctctcagtctagtgttctctccaygccacaccctgcctcttagacatcctcgcatcccagcaaggatgcaaggctgggtgcgactggagagaacaatggaggctccccacagactggagactggaggcagggtctcctgtccatccctctggctcttctgcatgccccaagcttggcagcaggctcgctgctggccgctacactgctggtccgttgattccatcatctcctcccttccccttctgcccaggctgttgcaycttttcagagaaawacagaagtgtcttttccgcaggaaccaatgacaagccagggggcccacactacatcctgcgctggacgtcgccgcaggtcatcaaggagacacataagcccctgggggactggagctacgcgtacatgcagtgagcccctctcgggctccaccgtccagctgtctgtcygtccaggtggccgacctcactgcacagaccccactccagcccctccaccccttcttcatgcacagctgcctttctataatccrggcytgactcccttcttaccactgtattctggcctctcccatgcctcaggctctggtttgagatcgtgctggggaggaacatggccactaccccttatcccatcggccatgtgggaggtatgaccctggtgcctggcaggttctccctctgccctccactgggcccagtggctcagggacctggggaaaggagatggagcagctcttgggatcctttggggaaaaggaggccattctgggccccttggcaaacctcaccactcacagaggctcctggccttgatccctgcccctccaggtgtccagggtaaagtgtaactcagacygacctgtggggcacagggggcaccagctggccttgccctctctggtctgggctgtctrccttcctcactgtatctttgcccagacccacctgggccagtaggcccctgtccccagccacacaccttagatgctggcatgccttactccaggtgcctgtgtttggccgaggcctgtgtgattcccggtctgcaccacatggcggggttggggggccgctggaggccacctgccaaggcgtgggatgggatggtcctgcrggtttaggcygtgattctggaaaaccttggatgggccttcgtcctatgtcagccttccctytgatcctcaggccctacctgtagagacctccactcctagagccagtctcagggtctgggatttccctgcaggagctcagccaccactgtgccatggtgacacaggccaaggcagacattggccctcccttctcccagcccccagaggcctggccttgrgttygtcagcatgggccgaggacgttgcctgtagaatcctcctctgcctgggagtggctctgtgtggaccagtccctcactggcccattctttttttgacgcagccaatctgtgaccacgattcctcccacagatgcctcctgcttggattctgagtggtcagagatctgtaaagcatgactttcaaggatggttcttaggggactgtgaaartgttgggtcttcctccaggatgcctgcatgggaccccacccggagctggtgtggccattcccsragtgccactggcccatggatgggggtgggtgctggtgccasctgggctgggtgtgggttctgtgtccttccaggatmtgtgtcatttcccatgaggggccggggcaggtggctgggtgggggcacaggctggagtattyttagttctactggttctacactgtgaggtggcaatgggatttgctcagatgccacccaataaaatgcctgttacttaatcacagtggtggatggtctttctggaggggatggtgggggcagccaacatcttttaagtctggtgtcattgccaatgtgtcacctggtcatgggcacagtgctctcagtgtgacagaaggaacagtaggtgctgatgtttgaaattgtctgttggaggcggtggggctgggttcacatcctggctcactgcccccccgccagccagatgattgccacaaagttatgcaacctctctgaccttccatctcttcatccataagatggggtaaccgccccctctccccgccatgggtcatcatgagaattgaatgagttaacacttccacatgcttagaatagtgccagacacatgatgattcaaaaatattacccataaggccgggtgcggtggctcacgcccgtaaccccagcactttgggaggccgagataggcggatcacttgaagcctggagtttgagacctggctggccaacatggtgaaaccccatctctactaaaaataaaaaaattaaccaggcatggcagcatgcacctgtaatcccagctacttggggaggctgagacaggagaatctcttgaacctggaaagcagaggttgcagtgagctgagatcacgccactgtactccagcctgggtgacaaagtgagactctgcctcaaaaaaaaaaaaaaaaatacccgttacccattttcgttgtaagaaccactatcctgtgtggtgatggttaattttatgtgtcactttggctgggcatggtgcccaggtatttggtcaaacattctgggtgtttctgtgaaggtgtatttggatgagattaacatttaaatcagtggagttttaaaagtaaaaagcaaggcaggtgaccgttcatcctgtgggtgggcgtggtctaatcagctgaaggtcttcataaagtgaagaatgagctctccacgcgggaaggaattctgccagcagattccccttgcactgaatcgctgcagctcttccttgggcctccagcctgctgggctgccatgcagattttggacttagtaagcctccataatcacatgagcaaattcttaaaacctctctcttgctcctgttctgtgtctctggaggatcctgatgaatatgtgtgctgaaggcccagtatgtttccttacaacagcctttggaaggaattctgccaccctcccattttggagagaaggaaatttaggtacagaggtcaggggccttcctgggggtatggtattgctgagacgtaaaccctggtctgttggggaaggattcgttcctggtacagccacaagaaggcacatatgactgctgtcttggaaagacacgctcagctggccaaacgatgactgagaggagccactgcagccagttagcttgagcccaggtctgtgggccctagcccatgcaggccaggtgacttgtggaggggtggaaacatgtgacctggcctgttcccacctgcccatgatgtaaaaggggctgttttgtaaaccacactgacacctccagggacaataggcaatacccagagtgccccaggctggagcacagaagggaagggtggcaactgcatttatagtcgtgggaccagcaggctgtggatgtgtttgaaccattggtgtgacttgcttaagatcacactgagacagagttggctaattactaaatgctttacctacctggtcacttagagccttggcagtgaccttaccaggtaactgtggcaggacccacagaggtcagaggtgggataactagctcaagctcacgcagctggttaggaggaaggctcgggcttgcacccgggtctgcagctgcccacggcccacgctcttcgccacctgctccattgggctcctgacttccaagctcctcctctcctaatattattttatccaaccttcctcaacctgtcacctttgcctccttttggactaggggtgactcaaagctgttgcttaccctgttctctctcctctacctcgtcccctagacttggggctggtggctcttgagggcccagtgcctgctcggggacctgaggcctctttgcatggtcaccacaataagtccctgtgtctgcgktggcccaaggagccccttcatttccctgctgtggccagggccagggcttggagcgtgaaccatttgactgaggccggatgtccctgccaccactgtcccacgggccgccagtggagcatgccctctaaggaaatgaggggccacctgtgctggctgcaggccaccaggctgacccagagctcctggcggggggagtcaggggaagtggcaggaggcagacccaccctctccagagagtcttcattttcactagttcgtccccgacccattcatcgtcttacttcctgggtgttctgtttaggggccagattagtaaataacaagagccaccattgtttgaatgcaggctgtgtgccaggcattgggctaaatgcttcgggcatcatggcctcggatcctcatggaagtctcataaagtaggtgctgttactcccattttacaaaggaggaaactgacaccaatgggttaagtaactaacatgccagtaggaaatgaacaaactgggttttagtcccacacctctgactcccaagcccctggccataaccaccactgcacagtgccctggagctggacaggcgctgggctcagatcccaaccttagcgtcttgttcctgtgccttgacctcccagcttcagactcctccaggagctgaggaccaaatgaaatatttaaaaacaaaacgctgcatcccatggcctgccagggtgaggtgcccaatcaatgtgaacttttaattttcaacctcaacacttcttcatcctagatatgtgtgttccccaggaaagaggagaagccagatttaaatgagcacctatcaataggccaatcgttcctacaaattctcttggaccacaccggcctgtgagatagtattttagcaccatttcacagatgaggactgaggcttaaagaggtgaagagagacctgcttagtaagggacgggggcaagagaagaacttgtttctgatgaacataccagcaaccccttgtcattgtccctcacaggaatccatccttccgggtgttctgtgcatgggtgggaggaggcactgctgctgtcatggctctgaacacaaccagccagccttgtcctgtgtccggggggctgccagcccccctggatgacggagcaggtaccacatgcccctcaggcacccaaggtaaagcagaaggctgttccaggcctctgccatgctttccctcagccctatgtgcccaggcagttgccctcatccccgaagcatctggtccatagaggttggagggagctgacgttcagttgggcacctgctccaggatgtgcatcggggcaggcgtcgctggagggagagtgagcctcagcgagggaaatgcccggaagaggccacacagcaagtggcagagccagaattggaaccccagtgagtcagattagagtgttagtcgacagccatagagtcacagaccccagccttttactagggctaaaattgagggtcccggccaggcgtgctggctcacgcctgtaaccccagcactttgggaagctgaggcgggaggatcacttgaggtcgagagttcgagaccagcctggccaacacggtgaaaccccgtgtctactaaaaatacaaaaattaaccggatgtggtggtgagcacctgtaatcccagctacacaggaggctgaggcaggagaatctcttgaacccgggagacagaggttgcagtgatctgagattgtgccattgcactccagcctgggtgacagagtaagactccgtctcaaaaataaaaattaaaaaaaattgagggtcccttgccagtaccatgccaggcacaaagccatcggcactggagggcatcatttattggtgatcatttactaagcaggtgcttgatatattaacctcatttaatcaccatttgggggtgcctgtggccgttttacaggtggggaagcttcgaggagtcaaagcctgcttgttgtcccctgtcccttgggccaggctggggcctcaggagccccacagaacaggaccactcccttgtcctcatcccagccctttattttccatcaagagctccctgagcctcttccttcccaggctgaacatcttttattccttcagctactctctgtgggatgtagtttctggatctttgtctacctagtgagctgctctggtgatgccagggagtagagtctggaatcatcctgaactgggatccaggctgtgtgacattggctgaatcacatcccctctctgggcctcagtctactctgctgtcaaatggggacataatgttgatagtactcatcccttacaattgttaggaggactgaatggtctgaaatgtgaaaacggattttgtgctgggcctggtggccaggaacaggtcagtcaacatgagccagtactgttaaggtcatgcacccgtgtgaggtctgatcacaacatcacacggcaggacgatcacctctcttgttctggacaatctgctcctttggctataaccttaaatttcacttggcttacacgaatacagtggaaagattaagaactctggagtgcaatgaaagtggattcaggccgggcgcggtggttcttgccgtaatcccagtgctttgggaggccgaggagggagatcacttgaggacaggaatttcagaccagcctgggcaacgtagtgagacccgacttctaccaaaaaaaaaaaaaaaaaaaaaagagaagtttaaaaattagccaggaatgctggcatgtgactgtgctcccagctacttgagaggctgaggcaagagatctcttgagcccggaaggttgaagctacagtgagccatgatcacgccactgcactccagcttgggcaacagagcaagagagcaagatctttctcttaaaaaaaaaaaagtcaattcccagggactttggacaagccacttaacctcctgagccctggtttcttcatctgtacaatggtgatacaaaatccttcacggagttctggagagcagatgcggtgatgtttgaaagcattgcagaggctccataaaagctgcttcctttcctttaggctttagtcattattacccttttggctcttattgagcttgtggtcatttgagacctccagctctttttctggttgagaggcaaactgctcaccgtcactcagcaaagtttggtgaggaggcttgagtggatccctgggtgcgaaagagtatcccaaccacagcagagtcccttcctgaggtcttagccgatccctggcttcccaactttaggagcccacaccactccactccttggacttcttgtttcagaggggtcggatgaggagtgccgatgaggctgggccctctgagaactggctttgaggccttcccagcaaccctcctccgaggtgcttctgaaccaagtgggttggcttaggaactgcccatctcccagaactttcttggggtggccctgcatgcccaccctctccccatcataagccagactggaggtgggtttctagcggcccagttttgtcctggagtatggagtgctggtgagaaagagggagagagaatggtgggtggggaaggaggagacaggagtgaatggagagatatgcaagtagagagacagagacagatcagagggtggggcaggggcagcagctgatgtatcccccagtccctagggtcaggatcctcttgggggctccccctgtgccccatcctccatccaaccgcagggcagggggaggaaggacgttcagggcagtcccttccagccgacatgcccatttcctttccctgcacctcaggggaagcagatgccaaggcaaatgggcagctcctggctggctgtttccatggctcacccctctctccttcccccgtggactttgcataagtctgtcatggctgttggtca

SEQ ID NO: 8776 - DNA, 130472 bp, Homo sapiens
tgtgccaggtacacagctggagctcaataaatgtactgtgacctcaggcaggaaaagccaaggaggggcgggccaccctgggggctggtctgcagagtcttcagggaagaagccaggacaaggacaaggaccctggatgaggacaggatgagaggatggctgcataacagcagggaggctttgggcaggcaggggagcctttccaggtgagtgaatggcaggaacacaatcttggaagtgagaattcctggggtgccttctgggccttgaagcagggctcacagagggcaacaggaccccgctggagtgaagaaggggactggagggtaaattaaaagaatagcagcttgtctgccctcatccccggtgtggggggagcagcctggcatggagtccaaatggacctcatatttcccaaagactcaaagcatctggggcctacctggaatgtcccaggaacacctactgcccggcccctcctctttcccctcaccaagcatgatgactgcaatgtctcataattatcacactctgcttttctccatctctgtggctttacatattctcagtgttcagctcttggtctgcaacatatctgcgtacaaacacacacacacacacacacacacacacacacacacacactgaggaatggctcccgggtcccagtagttcccactctctggtagaggagttgtgtttgtgagggctgtgatggggtgacaagcctgcagcagcctttccatgttcgtccaaactagatgtggtgcagagagcacaggcctgtggatcagcagatgtgacacttagcatgatggtactggttaggatcaagctaggcagtaacacacaacccaactgtagtgggtgcaacaagcaggtgcttatttttttgcagaagaaatcaggaggatggcaatctcactgctagtgcaggtgcttgaagctgccatcggggacccagatactttctggtgatagtgtatatggggggcatctgctggagcttgggagatttgggcccccattctggctctgttgctaactagttgtgcagcttcagacaaagcttctgaagctttgacttcatttctttatttgtttttaaaattgcaggctgagtatagtggctcctgcctgtaatcccagcactttgggaggctaaggtgggagcattgcatgaggccaggagttcgagaccagcctgggcaaaatggcaaaccctcatctgtacaaaaaaaaaaaaaatacaaaaaattagctaggcatggtggtacatgcctgtggacccagctactttggaaactaaggcaggaggatcacttgagccccgaagtttgaggctgcagtgagctgtgattgtgccactgcactccagcctgggtgacaaagtgaggccctatctcaaaaatgaataaataaaattgtggtaacaacatataacataaaaccatcttaaccatcttaaccatttttaagtgtacagtttagtggcattgagtacattcatactgttgtgcaatctgtcctcatgtctcttttctttccaaatggaaactctcccaattaagcaagaactctctatttcctcctccccactggcaccaccattctgctttctgtctcaatacatttgactgctccaggtaactcatagaagagggatcatacagaatttgtccttttgtgtttgacttatttcactcatcataatgtcctcaagtttcatctgtgttgtagctaatgtcagaatttcccctctttttaaggttgaataatattccattgtatggacataccacattttgtttagccattcatctatggatggacacttggtttgctttcacattttagctattgtgaataatgctgccatgaacatgactgtgcagatatttccttgagactgtgttttcaattcttttgggtatctatctggatgtgggattattagatcctatggtaattctatttctaatttttttcaagaagcataatactgctttccatagaagctgcaccattttacatccccaccaacagtgcacagtttccaatttctccacgttcttgccaaaatttgttattttctgcttttttggtagcagctatcctaatggctttgagactcagtttctcgtctgtcccacagggacatagtagggctagattatctctagcttctgatgtctcatggtgccttccttcttgccatgaaagtaagtattgcttatgcacatatacatcttagtaaatttagttatatcttttcagcttggggccccaaggtagaaactattttaatatgaagacaggaaacaagaaatatgaaaagggattgaagaaggcattccaaggacaacttccaaaccctcctctctattccttccagaccatagatgcacataattctgggccacagagagtcctttggacagaacaatactttactgtttcttctcttcctctccttttcttttttgcttgtaattcacacacccaggtggctaggcgcagtggatcacacctgtaatcccagcaccttgggaggcagagatgggagggttgcttgaggccggaagttcagtctgggcaagacttggtctctaaaaataaattacctaggtatggtggtgcatacctgtagtcctagctattcaggaggctgaggcaaagaatcacttgagccccggagttcaaggctgcagtgagctatgatcacaccacagtgccccagcctggacaagagagcaagaccctgtctggctcaagcaacaacaaaggaaggaaggaagaaggaaggaaggaaggaaggaaggaaggaaggaaggatggatggaagggagggagggagggagggaggaaggaaggggaaaaagagagaggaagggagggagggagggaggaaagagagaaaaaggcaggcaggcagggcaagaaagagacaaagagaaagaaagaaagagagaaagaaagaagaaaaaagaaacacacacacccatctcccactctttatagtgtcatgatgtcatttaacataagtgcaaggaaaagttcaaggcgtttaattctagcttttacaaaacccagaagcatcttgagttaagtactattatcttcatttcctaacttttggcattcgctgactcattatttcatatgtggcttgggtgagaaaagcatctgggtggcaacctcctcccccagctacttctctggccaatggggactgttctgaacttcccatacactttctcgcagcttctgcctgaggctgaaaccctttctggggtgttttcccaactgtcatcaggatgggatgcagaaccaggtgccatgctctgtccaaaccctgcctggctccggccttctcctgcagtctcacttctcaccgctcactctcctgatatttacccagacccaccgtgtggcttctcattgcggtgctcatcaggccatccttctgcttgaactgtcctttctacccatcctcccacagctaactctgctcatgcttttagactcagcataaacatcctctcccccaggaagccttccctgatccaaacccccgagttgagctaaatgtccctgcttgggtctcccacaacacttatgctcaccccgtcttatcataaccaacattgcagttgaagtgtgtgaagcacacatttaactaatggaattccactaactcctcttggccagaaggagaaagagaataactttatttatttatttacttatttatttatttctgaggcatgttcttgctctgtctcccaggcaggagtgcagtgggcatcatccttctgccttttttttttttttaagtttttgtagagacaaggtctcactctgttgcccaggctggtctccaactcctgggctcaagtgaccctcccacctcaggcccccaagtagctgggattacagatgtgcatgccgtctccctattcacattttattttactttattttgttttttgagacgcagtcttgctctgttgctcaggctggagtgcagtgggctgatcttcgctcacttcaactctgcctcccaggttcaagagattctctcacctcagcctccttagtagctgggactacaggcacacaccaccgtgcttggttaattttttgtattttagcagagatggggtttcaccatgttggccaggctggtctgaaactcctgagctcaggcaatccgcccacctcggcctcccaaagtgttaggattacaggcgtgaaccaccgcgcccggcccctattcacattttaaatagaaccactcttggccccctgaccactcctctctgagggttagatgggagccctgagtgttaccttagtcctcaggtgttttaacattgggagcctctggcctctctgggagtgaatctggcgtttaaagatacatatatttggccgagcgcagtggctcacgcctgtaatcccagcactttgggaggccgagacgggcagatcacaaggtcaggagatcgagaccatcctggctaagacggtgaaaccgcatctctactaaaaatacaaaaaaaattagccaggcatggtggtgggcacctgcagtcccagctactcgggaggctgaggcaggagaatggcgtgaacccgggaggtggagcttgcagtgagtggagatcgcgccactgcactccagcctgggcgacagagcgaaactccgtcccaaaacaacaacaacaacaacaacaacaacaaacatatatttcgtggagcaagaaatgtctcaaacatagcaagagagttgggatgccaacggaccaaagggaaagcaagcatgacatagccccccactacaagggcttacctattatccaagctttgggagctaggttagaatcccagctctgtcgctaaccaacctgtgtactttagccaagtcactgtacctgtctagacttcggatcgcatgtgtgtctgcccatctcatagggttaccctgaggctaaatgaggtaacaaatgtcatgaacccacaaggtagactcgactctcggtaacagttcgtgtcacccccatctcacactactctccctcttcggaccctgcacccatggattccatccaccgctggccaggagctgagtagaggcaccgagcacgtgaagaggtgaatgggcaaggaaggcttccaggtcaggtagcatttccagtgttccagcctgcaggcatctaccgagcctggcccgaggctggtacccagagatgcttccagtcttccagcagcaacgcactgactgtaagaaaagcctgcttataaaccccctacaggcatttggaagctggtccctggggtcctctacagattcatttcgcccccaaccccatcccctttgtgccaccctcgttattgcactcttccatccggatggcatttagctgggtccgggtctgtcacccgtctgaccaccagctccttgagggcaagaggcgcctgctgccctcagggtccgcgcccagcccgcagctgctcagatccggagacgggaaggtttgttggcgagaacctgactcccgggtcacagttaaggatgcaagagcccggcgccttcccgtagccccggccctgtcattaattaatgctggggctccattcggtgcagcgcagtcccagggatgcaaccgcaacttttgcgcacaataggctctcgatctgtaatccagccaacccaggcctgtagtgtgtaaatgccaactcagcgggagggctctggctgtcgcccagagccgtttctcggctctttcgcggttgccggcgcgctcgggacaggaggaacccgcagcccgcgggagtcagcggagacccgaccagcactatccagccctctgcaccgcccccgcggcgaggtctggaccaagtcgcccctagcaacaacagccgggccggctttctcaggccatgctgattggcgggactccgggtggcggcctgtcgtcacttccggcagccggaggcagcagaggaagccgaggggcggccatcttggctccgtgaggctytgaggtgcyggggtgcggcggcggcagcggcggccagcagggcggaggctgaggcagcaagctcgctagagagggagaagcagtcgggcgcaggcgcctcctccgcagcccgctccatggtcggcgcccacagcccgcggcggcctgtcttgcgctccacttccttcacatcctcctccgcctcctcgttttcaggcgccgccggcggcgctgtgtggaggcccgcgagctgaaattcgcggtgcgacgggagggagtggagaaggaggtgagggggcccaggatcgcggggcgccctgaggcaaggggacgccggcgggccgaagcgcagcccgccgcccgcaggctcggctccgccactgccgccctcccggtctcctcgcctcggccgccgagggagggagagaatgagccccgggacccgccgggggacggcccgggccaggcccgggatctagacggccgtagggggaagggagccgccctccccacggcgccttttcggaactgccgtggactcgaggacgctggtcgccggcctcctagggctgtgctgttttgttttgaccctcgcattgtgcagaattaaagtgcagtaaaatgtccactaggaccccattgccaacggtgaatgaacgagacactgaaaacgtaagtaacctgggcgttgtagttggcggaccttcggggtggcattcgtgctcctcgggcagtgccttgcagtcgggtgttccccccagccgaacgctctggaaatagagggcaggccgtagtcacccaggaggcagccaggtcggaccgtttcctccagaagtctgccgtgtcccgctgttcgcgggckggtctgcgaagtacatcgattatgccggcagtctagtcggttaataaagcccaggagttgcagcgttacggatcggtgctttgagaggccaggttgccgcgcaatggattgtgcaaaygtgtgtgtcagatcactgcagtggtcagtgcttattttagccgaactctgcttttaacttggtcaggcagttcttgagagactgtcacattaataacatatgttaccggtgctgattaagagtaatcgattgggtcaagtgggcggtctcgttctttaagatggtctggaactaaatttaatcacagtcactaagtgtccactgagggatctttgcggtccccttaggaattccaaaacactagcgcgcagcctttattaaggcagtttcctttccatacaaatcttttttgaaggagttggttaaacattttgaaaagcagatgtatagtgaagctctgctctgccactcactgcctagctgagggacacccgctgggggcttcgctgtcctccttcctaaaaagagattggcttagatgagctcttaggtccctttcagcgctcacaggctatggttttataaaaggaacctttgattttgttcatgtgaaactacaaaatgccaggaacagcattgctagagaatgagaacttgtagtagaaattccattgaagaaacgtttgactctgttcgttttctaactctgttctcctctaacactgggttcaaaagtgtttcaatctagttgttgmctatatkctgtaaaacatctagtaaataatttgtaaagaaacttcactggcctttcattaaaagtgttatgaggtaattgctggcacgaaatgtcttctcttagggaatgcttccttgctttgagtgttttcatgctttcagtaatgtcctgagatgttgtggcctagtggagttaatgctttcattttgatcttcaaaaatgccgcttgtttgctggatagctgtttgataatttaatccgtaaacgtaaaccatagcctaaagcatccctgtagcatattagtatacaatatttaatgctctgtggccctgagtaagtagaacagtgatgtacctttctccacctgagatagattagaaaattatataaagagtgagtaatagaaactcttagactaggtgagtcagggaactaatttccttatagtccttttaaagaaaccttatttatttgtttatttatttatttatttacttatttattttttgagacagaccgagactgtctcccaggctggagtgcagtggtgcgatcttggctcactgcagcctccacctcccaggctgaagtgattatcatgcctcagcctcccgagtagctgggattactggcgtgcaccaccacgcccggctaatttttgtatttttagtagagacagggtttcaccatgttggccaggctggtctagaactcctggcctcatgtgatccacccgcctcggctccccaaagtgctgagattacaggcatgagccagtgtgcccaactgattagttttgatcattgatcttcactcagagaagcaaaaccttacattgaaccagagtaggagctccatgctttctaaactgaagccaaaaacagtcatagcagatttgtgataatgaaggatttcaaatgggtcttttttctttctttcttttttgagatggagtctggctctgtctcccaggctggagtgccgtggcatgatctcggctcactgcaacctccgcctcccgggttcaagtgattctcctgcctcagcctcctgagtagccaggattacaggcatgtgccaccactcccggctaattttgtatttttagtagagacggggtttctccatgttggtcgtgctggtctcaaactcccgacttcaggtgatcctcccgcgtcagcctcccaaagtgctgggattacaggcgtgagccaccacgcccagccatgtagtgtatttaaaatgaatttttgactttttttaaaaatcaagtttatcacacatcgttgcattaatttaccatgccctgttacatttttaactcttgcattggcatgttctggaaggagctgtgtagctttcacagtgtggagcccttgtgtcagtgttataactcaggtatagtccatattaattacctacattactgcactgctaagtattagacttcctgccaattgagtggtgaatgtacaagaatgaatgggagctctcattctgttgagaaccttttttcttaaagttaggtttgttgagatgtaatgttcatctgttttaagtatacagtttggtgaattttgacaagcgtatagttatgtaaccgctatcacaatcaagatgtagaacacttccattgccagaaaggtcccttatggccctgtatagtcagtgccctctccctttcttagcccctgggtaaccactgatctgctttctgtccctgtagttttgccttttctaggatgctatgtaaatggagtcacagtgtaaataatcttttgtgtcttctttcacttagagtagtgcttttgagatttatttgaatgtgtatcagtatcagtagttcattcctttttattgctgagtaagtatttccttgtttggatgtgccacaattttttttaatccactcaccagtgatggacatttttggctattgtgactagaacagttttcttttagtattctgtaaaaatactttttattgtgcttaccccaggaatcttatttamattttaagtaattgtatataactgtgataagaatgtcgcttattagatcaagactaagaaaaggcaggccgggtgtggtggctcatacctgtaatcccagcactttgagaggctgaggctggcggatcacgaggtcaggagatcgagaccatcctggctaacatggtgaaaccctgtctctactaaaaatacgaaaaattagccgggcgtggtggcaggcacctgtagtcctagctactcgggaggctgaggcaggagaatggcatgaacctgggaggcagagcttgcagtgagccgagatcgggccaccacattccagcctgggcgacagagccagactccatctcaaaaaaaaaaaaaaattagccaggtgcggtggtgcatgcctgtaattccagctactcaggaggctgacgtgggagaatcacttgaacacaagaggtgaaggttgcagtgagccgatatcatgccactgcactgcagcctgggtgacagagtaagactctgtctccaaaaaaaaaaaaaaaaaaaaaaaaaaaaaagcagacaacttgcaacattatcttcatccttgtacactaatttgtttttgtttgatttccaaatattaatgtccacccttagtgaatgggtatataaaagtttactgttggccaggtgcagtggctcacgcctgtaatcccagcactttgggaggccggggcaggtggatcacctgaggtcaggagttcgagaccagcctgaccaagatggcaaaaccctgtctctactaaaaatacaaaaattagccgggtgcggtggcgggcacctgtaatcccagctacttgggaggctgaggctggagaatcgcttgaaccctggagacggagagtgcagtgagctgagatcaagccattgccctccagcctgggcgacagagggatactccgtctcaaaaaaaaaaaaaaaaaaaaaaaggcygggcgcggtggctcacacctgtaatcccagcactctgggaggccgaggcgggcagatcacgaggtcaggagatcragaccatcctggctaacacggtgaaaccctgtgtctaccaaaaatataaaaaattagccgggcgtggtggcaggtgcctgtagtcccagctactcgggaggctgaggcaggagaatggcgtgatcccgggaggcggagcttgcagtgagccaagatggcgccactgcactccagcctgggcgacagagtgagactccatctcaaaaaaaaagttcactgttgctgcatcgtgttatagctcaaaagaactactcaatctgatccagtgaggttgctgagactcagagaggtgacaaaggctgctagtaatgacagaagaccactaactatttagtagcaaagcctctactgggccccagatctctagcttaggctccacaaggagatgtagttgtacctgtacatagagtatttctaaaactttttttttaagcttgtagatcaggggtgtccaatcttttggcttccccgggccacattggaagaattgtcttgggccacagataaaatacactaacactaacaatagctgataagctttaaaaaaactgcaaaaaaaatctcacagtgttttaacaaagtttatgaatttgtgttgggtcactttcaaagctgtggtgggctgcatgcagccctagggctgtgggttggacaagcttgctgtagattttattttgattttgagacagtatctcgctctgtcacccaggctggagtgcagtggagcaatcacagcttgctgtaaccttgacctcttgggctcaagcaatccttccgactcagcctcctgagtagctgggactacaggcgtgccccaccacatgcatggctaatttttaattttttcktagagatgagatctccctgtattgcccaaggtggtctctaactcctgggctcaagcaggcctcctgtcccagcctcccaaagcactggaattacargtgtgagccaccacactcagtcaaaactattttttaaaatattttattataggaaaatttaaaaaaatagaatgttatttatcaatgcttctcagccacagggtgattttgccctctagtggacatttgacaatgtctaaagacatctttggttatcacagctggagaaaggtttggctgaccaggaatgctactaaacattttacagtacrtaggacagccttccacagcaaagaattacccggcctaaaatgtcagtagtgccagcgttgagaaaccctggtatgtacttagccccccatgtactcaacagcgcagctcagtggccaatcttatttcatttataaatgaagaagcaaatgcagtatcatttcctctctaaagcttttagaagagataaagcctgttttaagaaaaaagcaatacttttatcatattttcttaatatcaaatatgcagtatttaaattttctcacatttctaatttttaaactgttcaaattagaatccagcttgaattcatacattatagttggctgatatgtcaaatatgctttttttttttttttaattgagatggagtcttgctctgtcgcccaggttggagtgcagtggtgcaatctcrgctcactgccaacctctgccgcccgggttcaagcgattgtcgtgcgcagcctcccgagtagctgggattacaggctccygccaccatgcctggctatttttttttttttttttttttttttttagtagagatggggtttcgccatgttggccaggctgttctcaaactcctgacctcaggtgatccgcccgccttggcctcccaaagtgctgggattacaggcgtgagccactgtacctggtcaaaatatgctttttaaaggcaaccaaacagtttgcatttcagtttatgttctatagttatatggagccacggatacatcctttttctatactggcaaaatgagaaacatatttttcacctgaatttcaaaggatatgacacttcgtaagcctggtaatgttattggccaaagtaccagaggcccagggctttcccagttatttaacagttactgatatgtgtgcatcatgtacttattattagttaatgcaaatagtcccccaaatttctgacctctgtgaaactgatgatgctgttgtctagtcagtcatcggttatgtgagactgaattaacctattcagcaagtgtgaatgcctaccgtgtgtatgatactgtgctaggtgctgtagaggccatatacctgggacacatagctttcctgctctttaggatttcctgctccttgcaggacaaagcagcctgagctttatgaaactartctgtaactctcaaacttaagcaaacattagaatcacctgaagggctttagaaccgtgatcactgggccctacccctagaccttgattttacccgtagaattggaatttctaacaagttgccaggtgatgttgatgctccaggtccggggaccactcttaagaatcactatagcaggaatttctgatgtttatttattaagaaaaaaaaatcactgccttagtgtgcagtgaaggcttgctaactaaactatactccttttagattgtactgtgactatcaaaggaagatttccagaccatttaattgagttttcaggttccatgagtttaaaaaaaactgtttattaaaaattgtggttctggaaaataacaatagttgccatttggtgatcacttaactgtataccagccagcaatactttgtagagtatctcatttaaaatatgtaatatggttttatttaattagcttttttttttttwaaatttcctgaggcggagtctcacactgttacctgggctggagtgcagtggcacgatctcgctcgctgcaacctcygcctcccgggttcaagcgattctcctgcctcagcctcccaggtagctaggattacaggcagccgccaccacacccagctaatttttaaattttattttattttttgagacagagtttcactcttgttgcccgggctggagtgcagtggcatgatcttggctcactgcaacctccgcctcctggcttcaagcaattctgcctcagcctcccgagtagctgggattacaggtgcctgttaccatgcccagctgatttttttgtattttcggtagagactgggtttcaccatgttggcaggctgatctggaactcctgacctcatgatcctcccacttccctcctcggcctcccaaagtgctggaattacaggcgtgagccactgtgccccggcttaatcagcttgtcaacttctaagcacaacctgttgaatcaagctgtttgggccttatcagaaaaaagttggcctatagtttcagctactcaggaggctaaggccagaggatcacttgaggccaggagttccagtcgacctggacaacatggtgaaactatgtatcttaagaaagaaaaaaaaaagttgatctctgaagaattcatgaaaatatttagtcagttttcagggaaagatcttatagacttcaatttgagcatccttatcttatgtatgtaaatgaggtaaaggttgaaatttgcagtaaatagaattttggtcatttaagttatgtagctcatgatatatacattgtataactatttagacttacatggtgcatgatttacattgtaattacatagaggcttatacagtctaataaaaattaatattaactrtttgattgcaaagaggattgttctgcattttattactttttttttttttttgagacagagtttcactcttgttgccaggctggagtgcaatctcgtgaccttggctcactgcaacctccgcctgccagcctaagtagctgggattacaggcacacaccaccatgcccagctaattttttgtatttttagtagggatggggtttcaccatgttagccaggctggtctcaaactcctcaccttgggtgatccgcctgccttggcctcccaaagtgctgggattacaggcttgagccactgcgctcggcctgcattttattattctaagatatagccaaattttatgcctggaattttttcctgggctggaacaaattcctagtaagagtcagggaatattccgtgacttgtggctttggttaaaaaagaaaaaggagtcagggaatgcagtaccctctgatcaccactgggaggactaaagcagaaaattcatttgtctcatatccattttcaaatttcaaattaaacatgaaggagaaaataaatctcttacctgggaagctttaatgtcctgtctcacacaagaagttaaaggttgtgcttggagttggtctgcaaaagtaataaggaatttgtactcacccgtctgcacctgcttgtacagaacaattggaagggcagaagttggctttgaaagaaaaggcctttttttggaggtgggaggggcatccaattttgtcttcagccgagagttcgctagcactacactctagccactcaagctgctcaactatggttggtcttgtgtacttctgtgtgcactagataagacattgtttctgtgggttatgtgggaccttgaagttcagtgttgaagctcaaacaaagcaggtgttttttctgtatttcttgttgacaggcatttgctttttgttggacctaaatattgtggggtttgtgtatggacatttgacacaaaaatctgtattggtagaatttaatataaaatcagagaagttgaattcacaggttttgttcatagaattttacataactctagtcttttttctttttttgtgatggagtcttgctctgttgcccaggctggagtgcagtggcatgatcttggctcactgcaacctctgcctcctgggttcaagtgattgtcctgcctcagcctcccgagtagctgggattacaggcacccgccaccacgcctggctaatttttgtatttttagtagaaacggggtttcaccatggccaggctggtcttgaactcctgacctcaagtgatccacctgcctcggcctcccaaagtgctaggattataggcatgagccacagcgcctggccacaatcttacactactttcctgaagggatgtgtgatggaaagagtctgggcttgaaagtggaagacaaaaatgagagtctaagactgatcgagataaagattctgaagaggtagaatggacctcataagatggagcaaaaaagaaggaacaacatataaaaggagaaattagaatttagagttatagactggaatttgaaactagtcttgagatttaactgtggacaaattcactcggctgtgcctcatggtttttttttttttaaatcaaaagagaataacatcatctcaagttgtgtcttggtttttttgtttgtttacttagatttttatgacttcactttctcaatttcctctgtggccagattcatcaggcattcagtcactttcatctctgtcaggctggccttgtgttctgtctgtctgttctgctgcatagttgtcatcctgagatctcccttcacccatatcctagggattccctttgcctttcctgttcgatccattttcttccccttggttcactcccaggtttcattgcagcagttcctccagtgattttctgagaaagttgctcagaggtaaatttttaaaatcctttcatatctgcaaacatctttattctgttctcatacttgattgatattttggctgcatatagaattctagactgaatgccctttttcctcagaattttgttttctgtcttatatagcatctgacactccratttggagagagagaatgctattttgagtcttgcttatttttctgtttrtttaaggctgattggaagttttgtgcatttggatggatcttgaatacaacagtgggacacactgttatttctttgtggtgctcttgataccaatatatttagtcttatcacttggcctaggcaagcacrgaatgcccatgttccagggagctgagtcgggagagggcagaaggaaagatctgtggctttctgctttctctgcttgttttcagtgtccctgccctcagttgtgccctgtgtccccaagcccagagactttccattttgccctttctaaagaacctccagttttttgcctgagtgggagaggagacccagggggtctgttatttaacagactgatagatcttcttgtttcaggcttacttcactcacacttctagaggtacttgtactaccagttcctgaaccttttgagagttctataatacaaatcaggattttccaatatctccatagctggcttaggattaatctttcttatatgtrttaagtcattttccttctttttttagtttctgaaagtatatctgttaccacttttattttctttgtcttgtggcttttttccttatgccttatatttttttcctttactttcatattaatggagtttggagagggaggggaagtaaatgcagccatgatttataaccagacttggattaggtgtttacatatgtcaatacatgtctttaaaatttagctagtacttgttattataaataacaaactaagattgataggcttcttgaaaaattggcggtaaatttggctaatggtgggttgttgtagtagagtagcgtttccccttttcacccaagctttgttacctcttcttgggtggtgcctggcctgagatgtccttcatctctcataagaactctcctacttgccctttgaggactccatcccttcacatcttggggtaccttttttccttcatctcacccaaatgtgatcatgtcctttgggtgcctagagctgcattatccagcacagtagcaactagccacatgtggggctaccaagcacttgaaacgtggttagtttgaatttaggtgttctgtaagtataaaagataaaccagttcaaagacagtatttcaaaaataggatataaagcctttttatattatgcattgaaatattggggggtatattgagttaaataaaatggtatttaatttaacgtattaaatatgtttctttttacattttttaatggagctactagaaaattgaaaattacatatgtatgtcacattatacacctattggacarcattagagtattcactctgattttctcttggggcaggaattgccccttgtttcagttgctattcccccrttagcaccccgtgtatatcatgagtgccttgaaggtttgacaccacacttttctgtttcttttattccctgctaatgcctaccatatagttgactagccgaaagttactgaataaacattttttttttttttttttgagatgaagtctcactctgtcacccagactggagtgcagtggtgcgatctcggctcaccgcaacctccgcctcccaggttcaaacgattctcctgcctcagccttctgagtagctgggactacaggcacccgccaccatgcctggctaatttttttatttttagtagagatggggtttcaccatattggccaggctggtctcgaactcctgaccttgtgatcctcctgcctcagcctcctaaagtgctgggattacaggcgtgagctaccgcacctggcctgaatcaasatttttttagccacaacttgtgccttacaagttttttattctaaggattagacaagtaaattatttttcaccgtattacattagttcacctactataccagtaacaattattttattcaaaagtgaaacagattttactatatttatgggacaataacagttcccccttcctattcatattcttagatgctttctcataaattcagctgtgaagagtcacattatctttgatccatgtgagactatcttcttgttttatctactcctgttagtctccatatgtcattactcttaccctccaccccacgttactgttttaatgtgtttagtatgtgtatgtgttcttacatagtttattttggtatgtttggtactttatgtaaatattacatatgtcttatctgtgcgcttaatatattgcatctaactgctgaatagcagtgagatgtatgcatctaccacattttaccagtctgctcgccagaggtgcacatgttaattttctccaactctgtcaccacaaaaaaaatgcttcaacatcttcatgcatgtccccttatggagcaatgtaagagtttctttgggatatatagcttggaatggacttgatgggtcacaggaaatgtcagattgttcttctagatggctgcttccatcaatagtgcaccacagtttttgtattcccgtttctctgccaacatttcagagctttctgccttttccctatctaacaggcctaaggtgatactacattgtggttttaacttgtatttctctctgatttttagaatctctttatacattccttggctttgggtgcattcttgttttttgcgggggttggtgatttttatcaaatcaaggacagacatcccattctaatcctagtttgctataggaattttgtgggggctttttggtagagacagggtcttgctatgtttgcccaggcgggtctcaaacttccgggtttaagcaagcctcttgcctcagcctctgaaggtgctgggattacaagcatgagtcaccatgcctggccaagagtttttaaattataaattgttcaatcttatcaaatcctttttctatgttgaatgaaataattgcctagctgctttcaaaagtgaaacgtgactttgtgaatatttctaaagtacaaaatacttggaggacagccatttattgtcacaacttggctttgtagtttgtttttgtttttgttttttaacatttggaaaccatacctatgtgttaagtaagtggcttgtgatttaaggaatagaatgcatgtaagggcacacttcttttgttttacagaagggatcaagttctgttcaggaagatttgaaacatagtgtaaagttgttgctgttttaaacttgtaaacctgattcttctcatgtgggaggtacgtaagtaggcctctcagatttcaggttggttctctgcctggtagatacaagggcaaaactattctggaaccatattgatgttaaaaaaatttttwacggacttcctgccggcaaggatttttttaaaagattttttaaatgtgtctaagaaatgttttaatttgtcttctgattatacagtgatttacaattcatgcttcttttatatgtgggcaaaattaagaactaatatgtaaaacaaaatggagcacattcccatttttcttattgctttgagttgatatggcccctatgtcagtagtgctttggctgaacgtcacaaagacctaacacagtgccctaaacaaatagggggtttgtttttctccaaaaagaaatttggggtagggtgcggtggctcacacctgtaatcccagcactttgggaggccaaggcrggtggatcacgaggtcaggagatcgagaccacggtgaaacctcgtctctactaaaaatacgaaaaaaattagccgggcacggtggcgggtacctgtagtcccagctactcgggaggctgaggccagagaatggcgtgaacccgggaggcggagcttgcagtgaatcgagatggcgccactgcactccagcctggggcaacagagtgagactccatctcaaaaaaaaaaaaagaaaaaaaaaaaargaaaggaatttggaggtatgcagcgtctagctttgratcagcagttcagtaatattggagttggtggtattttaaggtagttttgtcttttctgtcatgtttgagaccctgtagctacaggataatgttttacagttacagctacatggttgcattcaaggaaggaggaaggaactgtactggcaactctgtccttacccccccaccctccttttttttttgagatgaagtttctgtcactcaggctggagtgcagtggcggaatctcagctcactgcaactgtcgcctcccttgttcaagcgattctcatgcctcagtcttctgagtagctgggattacaggcatgtgccaccatgcctggctaatttttgtacttttagtagagatggggtttcaccatgttggccaggcaggtctcaaactcctgacctcaggtgatctgctagccttggcctcccaaagtgctgggattacaggtgtgagccacagtgcccggcctccccttttatgataaacaaaggcattaccaacccctaccccctactacattgccacctagtagactttaactaatgagaactggccagaactaagccagatggctatctctagctgcagagaagtttgggaaaacaagtatttggccaatgtggtctccctaaacacgtgttcaacttcttgaagaaggaaatctcatgtctttggctgtattcagcatttttcagtagcagttacatattctagttttcatggtggatgaagtggtaccagcttagttccacaggagggagaagaatcaggactcatttaatccataagaattaaactcagcagcttttgagtacccattatgtgcatagtctgccatgaaatattataaagtagtccaggtatggtggcttacacctgtaatatcagcactttgggagaataagacaggaggattgcttgaggccagagtttgagatcagcctgggcaacatagtgagatcctatctctacaaaaaattaaaacatcagccatgtgtggtgtacgcacctgtagtaccagctactaaggaggctgaggtgggatgatcccttgagtccaggagttcgaggctgcagtgaggtatgatcgatcacactactgtactccagcctgggcaacagaacgagaccctgtctcaaaaaaaaaaaaaaaaaaaaagttatcaaagaattatataacattttgtgtgtgtgtgtgtgtgtgtgtgtgtgtgtgtgtgtgtgtgtgtgtcaggttgtttattggctccttaggaagaaaaaaatacgtgtatgaaataattgattaacagtacaagaactcataattatttgtttaaatgtttaatgttggtactgagtgctgtggcataggaatagggaactttttcttagggtcggtgatggattcttgggaaaataaaatgaagggcaaatggaagcaaaagacaatttaatttgcttctgttttaagggaacttttaaaaagttaattcttaaattttttaatttaaggacttcgtcaagaaacatcgaattaaatatattgagtttaaccctaacaagcatcagatctttcagtctgctgtatgaggaaatacaagtttctttctgctttctattatgattgttgatttgcatgagcgtgttttaggttaggctgtgttatgctgtggtaatacataccaccaacatcctcatgatttaacacaataaaaaacttctgctcacaccaagtctgcttgagggctcattggctccgtggaaactgatctccatgtccaggccagtttggtcttgtggccgtccgttttagggcagtgcttagggtcaggagagcaaaacacagggctggagagttaagcacaggcaactaaatgcttcagcatgggaatggcattcattttcactcacaggatgtgttcagcttagtcacatggctgtctatgcctaacctcaagggaagggagtgcagtcctccaggaactcagatgtaaaaaagccagtatgatggatatagtattgtctacaaaaaaaagtagcataatagagttagatacaagcaaagtactctaggatcccagtaaggagaagtaagaaattctgatgagatgcagggagagccttagaagggttcatgaagatggtgacagatgatacaaactcagtagaatgagcaggtttttcttagatttgaagagaagaaaggacattcaaactaagggaacaacactgactgagtcagagctagactcaaagctagagtctactggctgatgtcgtgggagaggaagaagagatgagcgggccttgaattcgtttaacattcagcaaaaatgtattgcatgtctaccatgtgttaggcactgtttcaggtttggggaatatctgataatgaacaaaacacaaaaagcctgtccttgtgaaggttacatgctagtggaagaagcgctaaggagttagtattttattataagcacactggtgagtaagcaaagataggaacattggatgcctgtgaatcttaagattttcctggccgagcgcggtggctcatgcctgtaatcccagcactttgggaggctgaggtgggtagatcacttaaggtcaggagttcgagactagcctggccaacatagtgaaaccctgtctctactaaaaatacaaaaattagccgggtatggtggcgcgcacctgagtcccagctactcatgaggctgaggcaggagaattgcttcaacctgggaggcggaggttgcagtgagctgagattgcgccacygcactccagctgacagagtgagactccatctcaaaaaaaaaaaaggatttttctaagatttctattttacattaaatagaaggcagttggtttgcatgaaaattattatttcatcaatttgactgcctcattatagaaaacacatattgaagtcaaataaaacgtagagatgaatctctgaagttaaaatatgttatttgggacgcaagaattgcaatttggggcacacagaccacagggtggtcttcagtatgtatgaagaacaaagtaaaggatggaggttttataaagagaagtgttacatattttgaaagacaggtcattggcactagtaaagttttggggaggtggcaagccctgattggtgagtgacagtggtgggtaatactggtcttagagtcagcaacaagttgtttcagtagccattagataaactggtttcaggttacaataggcagtttcagcagccaggcttacagagaattataatcttggagcaatgttacatccctccccctcccctggccccccaccccatccctgcccctcagctctgatttagttgagtacgaataggatgacccaattagtatgatcagctttcacacatgaaggttgaatttatgaaacatgtaaatttgaaaatacatgtttacattgcaaaaagcttttttaacaaaaattttggccagtagtataaattcagtgaatatgttttcattgcacagatagtaaaaccacttgatacatacctcatggggatatggacygctttatgcgctgctttttaccacaccttaaatagtgcctggttgtgtgtgtgtgtgtgtgtgtgtgtgtgtgtgtgtgtgtgtgtaactcagtaaatattcaatgaatgaatgaagaaattcagaagataaaaaagagaaatttcccttatttttaaccttctgaacactatagtggttagcatttatatcatttattcagccattctaatatttattgagtascagttttgtaccaactgctrttctaagatataaggaataataaattcctgttactgttttcatgaaacttaaattctagtgtaattaaaatcatgtagaaataaacataaacatgatcacccagcttcttttaaaactagactgcagttgatgtaataatttgcattacaacagcatgcatcttgtgcacaacaaaatctacctgtttttgtattaaagccttagtgtcaaagctttattatcattttagtcttttatcaactccatatttataaatggtctattttcccaaagttctaatatggaaatcagaatcatttttgttagaggaacaatgtttacaagttgcctagatttgcagtgaggtcataaaaagcctgtttaatctaaaatagacatttgcaataaaaacagaaattgttgttgagatgccatattatgtgataactgagtaaaacagacaagagcctatcccctaacctggtatgtgaatgtgaaaatattagagaaataatgaagaagtagatggagactaatgaggaaattctgaaaaggacatcttttgagaaattcagaggtagatggcgcaagttttaaagcttactttcactttaaaacacctgagtttcatttcctttgatttgagtaaattacaaagcagtttattagttaaatcaggcttgttttgatttataggtatatagagaaagacaggacattttcctggacagaaagttggaaaagagaaacgtgtaaagggggtggaaagtggctgtgagtgcatgtggaatgagaagcctcccttgggcaggagttaacagccacaatggggaaaggattgggacatctaatcctttgagtgtgtgtgggggccaagggagcagtagtagcaggatgcctgcgcatacagccatgtacacagtgtgtacacagaagtgtaattcttgggcctgaatatttcatagggtagagacatattgagtactttattaagtaagcatattgagtactttattcatctatacaacaagggtcgtctattaagggccacacagtctagctgtttctgtaaagcacattgttttgaattactgttagcagtgtagtatagaaggaaatcgggaatccagattctctatggatttccccctgaacagttatgtggctgtatccttatctagtgaatggtgacattagcttttcccctgctgcacgggctgtagtgaggctcaggtgtgcaggtgcacttactaacatatggaaaagttaagcactgtataaccagaaggtagcccttttactcctattttatatgacagccacgtatgcaaaatatctaatttcttcctgaacactcaattgaacttcaacacttcgtatttttcgtctcagaatttttattttcctcaaatttatattatgtggttaaattcctttgaagtgctagatactttaagattaaaattaaagtaggaatgttttttcttcaattagaagctcttagaacttggcaagtactctgtgttctctcatttccttatctttgtgtatgctgtattgcagcacacgtcacatggagatgggcgtcaagaagttacctctcgtaccagccgctcaggagctcggtgtagaaactctatagcctcctgtgcagatgaacaacctcacatcggaaactacagactgttgaaaacaatcggcaaggggaattttgcaaaagtaaaattggcaagacatatccttacaggcagagaggtaaataccagttatgcttrtttctgttatgacagttgctctgtttatttccatgtaagagaaagaaaagaatatagatataggccttatttcttttttttaagatggagtctcrctcygtcacccaggctggagtgcagtggcatgatctcagctcactgcaaactctgcctcccgggttcacaccattctcctgcctcagcctcccgagtagctggcagtacaggtgcccrccaccacacccagctaattttttgtagagacagggtttcaccgtgttagccaggatggtctcgatctcctgaccttgtgatccgcccgtctcggcctcccaaagtgctgggattacaggcgtgagccatagcgcctgtaatatatagctactatgtattacatgtattacatgtcaagttctaaccacataatataaatttgtaatacatagctgggattacaggcgcacaccaccacaccacgctaatttttttttttttttgtatttttgtatttttgtagagacggggtttcaccatgttggtcaggctggtctcgaactcctgacctcgtgatccacctgccttggcctcccaaagtgctgggattacaggcatgagccaccgtgcccaacctattttattttcaagacagggccttgccctgtcacccgagctggagtgcagtggctcaatcatggctcactatagcctcaacctcctggggtcaggcagttctcccacctcagcctctcgagtagctgagactacaggcatgcactgccacacccggctaatgtttaaaaaatttttttgtagagacagggttctcaccgtgttgcccaggctggtcttgaactcctgtgttcaagcagtcctcctgcctcaacctcccagagtgttgggattacaggcatgagccaccatgcctcactaattaagctttttctttttttgggggttaggggggtgtcgggggttgggacggagtcttgccctgtagcccaggcctggagtgaagtggcatggtctcggctctctgcaacctccgcctcccaggttcaagcgtttctcttgcctcagcctcctgagtagctgagattacaggcgcacaccaccacgcctggctaattatttttttttttttttgtatttttagtagaggtggggtttcaccatgttagtcaggctggtttcaaactcctgacctcaggtgatctgcccgcctcagcctcccaaagtgctgggattataggcatgagccaccacgcccagcctaattaagctttctcaaaagaacatgaaacatatattaggtgtctgggagttttttgttttgtttttgtttttgtttwttttctgaggcagagtctcactctgtcacccaggctggagtgcagtggtgcaatctcggctcactgcaagctccgccttctgggttcaagccattctcctgcctcagcctcctgagtagctgggattataggcatgagccaccacgcccagcctaattaagctttctcaaaagaacatgaaacatatattaggtgtttgggagttttttgttttgtttttgtttttgttttttttatgaggcagagtctcactctgtcacccaggctggagtgcagtggtgcaatctcggctcactgcaagctccgccttctgggttcacgccattctcctgcctcagcctcccgagtagctgggactacaggcatccaccaccacacccggctaattttttgtatttttagtagagacggggtttcactgtgttagccaggatggtctcgatctcatctcgtgatccgcctgcctcagcctcccacagtgctgggattacaggcgtgagccaccacgcctggcccatctgggagttcttttgctttcccattactttaaacgttggaaatatcatagagtgtttaaatagtctttacctttaaaaataggtaatgttttgttctttttcagtagcaaatgtctgctaccacagtaaaaattgtctttaacttcaggtatacacttatgtgtatgagctcatgttacttgctaatcaatattattgtcaatatttacagatttatcttcaagaagtttcttaatctctctacttttctcatagcgtatgtttaatcggttattgtgtaggaaggcacatactttcctaacctttgtgaaatggctttctgctcagccccgttcctattaatcaaaaatacatgcattaaaaccacaaaactaactccctcctcttgttatactcatatggtacagagcctgttttgcctcttttttttttttttttttttttttttgagacggagtctagctctgtcgccaggctggagtgcagtggtgtgatctcagctccctgtaacctccgcctcctgggttcaagcaattctcctgcctcagcctcctgagtagctgggactataggcgtgcgccaccatgcccggctaatttttgtatttttagtagagatggggtttcaccatgttggccaggatggtctcaatctcttgacctggtgatctgcccgcctcaacctcccaaaatgctgggattgcaggtgtaagccagcgtgcccaacctttgatgtagtttcttgcayttaggtctttgcgcctgcttttccctgtacctgaaatactctttactcttctgtttagggaacatttctgagaagtaatcattgacaaatcccctttccccaggcatgggattccataaaaatcccgatactccccttatatggcacaatttacattgtattggaattgctcgtttgtctgtctccttctctagtttgtaggctrtctccagtctgtaggggaagatgacagaacttaacacagtgcttggaacctgttaggtacttaataaatatttgctaaatgaatgcaataatactgttttttggcgggggggaggtggtgttggcaacagagtctcactgttgcccaggctggagtgcagtggcgtgatctcagctcactgcaacctcccgcctcctgggttcaagcgattctcctgccttagcctcccgagtagctgggattacaggcacacgccaccgcacccagcgaattttttgtatttttagtagagagggggtttcaccatgttggccaggctggtctcgaactcctgatgtcaggtgatccacccacctcagcctcccagagtgctgggattacaggcgtgagccaccatgcctggcctgaatgtagtaatacttttgaaggaagcttttaaaacaaatgctctccctgtgcgagacccttctgatagatgtgccaagactgtgacacatatggcgtagcattcatgcctgcagcccaccaggcctggggctgcaagagcatgagccctgggtctgtcatctgtcagcatgcatcctctgtttgcagcartgtgccctgtaaatattttcatttcctgtgtgtgcggagacttggaaaaggttgggaagcactggactgtgctaactggaattttaaaagactgttgccagaaatttgccttttgacaattcattaattttagtgataaaattcttgtggatttttagttaagactccttgttgctgagctgccttatagactgcttttggaatctgtaaacagcttgtgtgggcggagctgtccttgttgtccttgattaaagctttcttgagataaggaacggtgagacctctgagtttcttagttcccaccagttccaggtggctacttgccagcttcctcatgtgggcagagatggtgggccaagagagcgttgagacagacgaacctcttccatttaccttacctgatttacattatctagagtctggcctgtggtgtttacttctagtaggttctttctctagaaatgcttgaatatgactagcagagtggtttaatttaaaaactttctcagtttctcagtttttttaaaactttgaacaagttctcactcgtaagtgggagttgaacaatgagaacacatggacacagggaggggaacatcacacaccagggcctgtcggggtgaggggcaaggggagggatagcattaggagaaacacctaatgtagctgatgggtcgatgggcgcagcaaaccaccatggcacatgtatacctgtttaacctgcacgttctgcacatgtatcccagaacttaaagtaaaaaaaaaaaaaaaaaaaaaaaaggaaaawctttgaacaaaatcattttactcttgtggggttttttttgcctattgtagatatgacatataaaatgtaaacattatagaaatatagaaattcattatgtaraaagtaagttccttgaaatttgtctcttcaaagacaatcactttcagcagtttggtgtatattcccagagttttttatatagacattaacttttaaaaaattttaacagaaagggactcatggaacatgatgacagtttttttacttagtaatgtaccttgaccatgtctgggtcttagtactcatagatctgacatattagtctaaaggcagcatagtcttcctggctatggtggtaccatagtttatttcctatcagtgggcattagggttgtttctaaatttttgttgttacaaacagatctgcagtggacattctttagcattgcgtgtccttgttaagtgtttctgtaggataattcctagaaatggaagtcctgggtgaaagtggatgactatttgacattgtaatagatactactaaattggttttgaataaaaagtgatgtacctactttattattctaccaaaatggaatagagtgttcattttcgtacatgcttctacactgtagataatttttgtctatctgaaggtctcartctgtttttgctgctgtaacacaataccagggactaggtaatttataaagataagaaatttatttcttacaattgtggaggctgggaagtccaagatccaggggctgcatctggccagggccttcttgatacatgaagggcgtgatggaagggcaaagagtggggaaggaagggaagaggaggagaaaggaagaaaagagggcagagcccttgcaatctgattgcctctccagggccccatgccttagtactgctgcaacagcaattacgtttcaccatgagtttgggaggggacattcattcaaaccatagcacgtatggacaaaaaaagggtgtagaraaaaccagaagttgctttttcccttttcactacttagatttatgatctttttatatatttttgtcattcataatttctttttgaggcaagttccctggccacccgcagtagctcatgcctgtattcatagygctttgggaggccaaggcaaggaggatcacttgagcccaggagtacaagactgcattgtgctatgattgtaccgctgtactccagccggggcaacagaggacactctctaaaataaataaaaataaaacaagtttcctgtttatatcctttattcatttttctttttttttaatcttagtgatttaaaccctttatgtttcagtcatctgtctgatgtgtctgttaatgtaggttatgaatatctttccctagattactccttttaactgtttatgatgtctttcttgttttagggaagtttttaagtatttatgtggcaaaatcatttaatctttttctttattacatttgggtttcatgtcttcttgaagatttgtcccgtgacttaaaaaacagttctataggccgggtgcagtggctcacgcctgtaatcccagcactttgggaggccgaggtgggtggatcacraggtcaggagatcgagaccatcctggataacacggtgaaaccctgtctctactaaaaatacaaaaaattagctgggcatggtggcgggcgcctgtagccccagctgttcaggaggctaaggcgggagaatggcatgaacccrggagacggagcttgcagtgagctgagactgcatcactgcactgcagcctgggtgacagagtgagactccgtctcgaaaaaacaaacaaacaaacaaaaaaccagttttgtattttcttctaatactcctcctatggctcacattttaacgtttaattcatgtggtatgtatttgggaagattagtattaggtgtagggatctgactttttttttccacttggattacaattgtcccagaaccatcagttctctcccaacaattgaagatacctgcgttaacacataataaattctcatatgtgtcctgttatttctccagtctgtttatttggtcctatacccataccgtggtgtttttattactgcagctgtggattgtatgttttaggtcaagttcccctcctgatgattcttttttttttctctctctctttttttggtgagatggagtctcgctctgtcgctaggctggagtgcagtggcgggatctcggctaactgcaacctccacctcccgggtttaagcaattcgcctgcctcagcctcctgagtaagtgggattacaggtgtgtgccaccacgcccagctaatttttgtatttttagtagagakgggatttcatcatgttggccaggatggtctcgatctcttgaacccatgaactgcccacctcagcctcctaaagtgctgggattacaggtgtgagccaccacgcccggccaatgactcttatttttcaaaattttcatagcttttttttttttttggtcatttactcttccacatgaattttagaattaagttgccattttctaaaaacagagcatgaaattttgattagattagttttcatgggattagttggttttttgttttttgttttttttactagtagcagtagaatcttttcaaatatgccttaatataggcgctggggcttgcccrtggtgctcttgatatataaggcccggacattctgccagttktttctcgagcagtgacaccaagaagttaacagccaggtgaatgttatgcacaagctcatcgtctgtcatcttcacgtggccaacagccacagccaaacataacatgttcatatgaaacttgattgtggacttcgcctcatccactttggccaccgtgttttcatcgtgtgtgagcagggaagggaactttactgcctttgttaggcctatgccgaggattcgtgggatttgctttatcagagactctgaagscaaaaatgcatcatacttcttggccagcttcttgaccagattcttattcttgagtttttttggcacctcagtgtccacttggggggatatccgtggccttggtctcgycacagtgctgctgttcccccaggacccacacttgggacagggagtggacttaagcctgacggtgccygagaagcgcttgtccttctgggggtcatagttcttcaagctgatctgcaactccaccatcttcaggaacttgggrcactttcactggttcccgtgcaggacttcctgcaccgcctcatccagggtgtcgtgagagactttgctgcttatgggttctcatgccacgctaaccagaaaagagggtttagttggttttataaattattaatagtttgggaggaaattgatattttaatgaygccaagtctttctttcttttttttctttcttttttttttttgagacggaatttcgctcttgttgcccaggctagagtgcagtggcgtgatctcagctcaccacaacctccgcctcctgggttcaagcaattctcccacctcagcctcccgagtagctgggattacaggcatgcaccaccatgcccggctaatttttgtatttttagtagagacgggtttctccatgttggtcagactggtctcaaactcccaacctcaggtgatccacccgcctcggcctcccaaagtgctgggattaccagtgtaagccaccacatccggctaatgccaaatgtttctattcaggaatgtgcatgtgtctcaaatttgttttcaggttttgtaactttttycatctatgttttatataatgcttgttaaattcatttcaagctattttataatttttgttgctaatgtaaatggaacwtttttttcctcaagaaggcaataatcatataacttcttgcatttgggaaacttttgatctctcatttggaatgtcgaaaattaagtttatattgttttttaatagcatgctttttttttttttttgagacagagtctggctctgtcgcccaggctggagtgcagcgcgatctcggctcactgcaagctccaccttttggactcaagcaacctcccacttcagcctccccagtagctgggaccacaagcacacagtaccgcacctggcttattttattttattttattttatttawttattttattttattttatttttggtagagatggagtttcaccatattgcccaggctggtcttgaactcctgagcttaagcagtccgcctgcctcggcctcccaaagtgctgagattacaggcgtgagccaccacgcctggtcagttgtctttttttgagaatgtcaaataaaatgggatcatatggtatgtaaccttttgaaactggcttcttctcactcagcatcatgtctttgagattgattcaggctgttgcatatattgacagtttgttcctttttgttgctgagaagtattctgttgtatggctgtgctacagttggtattagctcccccactgaaggacatttgaatagtttccagtgtttggcaattatgaatagaactcctgtacaggtttttctgtgaacataagttttaatttctctaggagtgacattactggatcgtgtggtaaagaattaagtgaattgttaactagaaaactgattttatataacagtataatattcctagtagaaagaaacctaaagcctctggtctggtctgtgaattggtgtatttttattacttagtacttttcttttctttctttttttttttttttaaagatggacttttgctcttgttgcccaggctggagtgcaatggctcaatctcagctcaccgcaacctccacctcccaggttcaagcgattcccctgcctcagcctccctagtagctgggattacaggcatgtgccaccatgcccagctaattttgtatttttagtaaagacagagtttctccatgttggtcaggctggtcttgaactcccgacctcagatgatccgcccgccttggcctccccaggtgctgggattacaggcatgagccaccacacccagctacttagtacttttctcagctaagatctttatttttgtcagcgttctcttgccctgtgatgggaacgtgatgtatcttgcctattgaagaactaaaacctctgaagaaaacccagagggttgtgggaagagtggcattgatgatttggggacttaatttgttctgagtcagtataagttaaaggcttattgtgtattatgttgagagttttaactgctatccttggggtaagaacagagatgtagaattatatcgtgaaaagaattttctgaaagaagggagtagggacaatctatatcatgcatttaagtcacaaggatgtcgtgaacataaaagatactcacgaaggccgggcatggtggctcatgcctgtaattccagcactttaggaggccaaggtgggcagatcacaaggtcaagagatcgagacctgaggtcaggagtttgggaccagcctggccaacacggcaaaatcccatctctactaaaaatacaaaaaatagccggggatggtggtgtgcgcctgtagtcccagctactcgggaggctgaggcaggagaatcacttgaacccgggaggcggaggttgcagtgagccaagatcatgccagtacactccagcctggcaacagagtaagaccttgtctcaaaaaaaaaaaaaaaaaaaaaaaaagatactcatgaaaaactatatgttcgttggaagaaagttgttttaatttaacaaacatgttggaataagaattataaacaagatacattaatatgtacactctgaagaccattttaaatcaagcctttaaatagcctagttatggtgtaagttcagtttagatgagacttcccacaggatgaccatgaaccaatcagaaatggatatcaaaatgctcattttatatatttttaaaatacatgtaccagttgtgaaattcatctgatttagctcttaaatgaaaatgctacccattatccatattgtcctggaagcatctatcccatatttactatgaatctggggatgttagttgcatctgctgtcttgcttttgaccaacttttcatagcttatggttattttggtgtgaaatattgcctgttttacaccacagttttctttcaagttcattattttccccccactaattttcatagcctcccagagacctttcccctcacacgaactacagaactcacttgtttcagtcatttgtactttattggagttatttattgtttaaaaattattttcctaaagtaatgcatgcacatagcttaacaagtcaaatatactaaaaagttctaatgacaatcagaagtttcttttcttatccctctttttcctcagcattattactcaaaggmcccaacttttttaagctctttcttctgttactcyaatagctttctccaaatttatcattttaaacatcattgacttccacttcccacttccatatctacatttctttccctagcttttctattgcagtgatatatttggcttatttacttaaattacgactgtgtaagtattgttgagctttggctatgatcatttattttcttatataattgtaaagctttgtctaaaattaatagttgtttctttttctataaactcttaggttttatgtgttactgctaattggccaaaatgttctagcttatctttcaaatattttgcagtactcacacatataatataatgtattagctcaagagagaatcggtgagtataaattagagacagcaaggtagctctttctaggcacagataagtgggatggtagctacagggagacattaggccaaggtattttttagaagatggacaaaatatcaacatatttctctactaatggggataatctcatagaaaggaggaaattggtgctgtcgaagagattttggaataggtgaggggatggtggaggcattggtctttggataacatggacagttcttccatagaaataggaggaaagcaagccaggcgtggtggatcacgcctgtaatccctgcacttcgggaggccgaagcgagtggatcacctgatatcaggagttcgagaccagcctggccaacatggtgaaacctcatctctactaaaaatacaaaaaattatctgggcatggtggcgtgcccctgtaatcccagctactcaggaagctgaggcaggcgaattgcttgaacccaggaggcagaggttgtggtgagccgagatygcaccactgcagtccagcctgggcaacaagagcaaaactctgtctcaaaaaataaagaaagaaaataaagtaaagaaataggaggaaagcagagggtgccggcatcagtgcaggtgaggggatccttatggtagtaggagcttgtagaaattttctgagtgcaaactgttttttcagtaaaatggaaagcaaactgatctgctacgatgaggagatgtattagagatgtgaggaggttaaaataattgccagataagcaggagagtgaatggactagagaaatgtwatagaattgccaggcagccttaaggcttccctgaggttggtgaccaaggatttaaagtgggaagagtcagcatggcgttgtgctactctccagccacattcagttgcccagctgcaggcatggcatttgcagagattggggttttgtcacattagtatagtgraaggacaaaggagcattgttatacaacaccccagggagtgatcacaatgaaattagtgatataattaggaactaagaacttgaggaggaagactgaccctatgaagktgtggggtcagtgaattacagatcctggtaagttccaacagttattagagtactagattgagtgagcaggaaggtagaagaagttagttaaagaatgggaagctcaaacttggatcatgaaaggttttcagatattgggaatgtcaaagactggagtataaccatgtaagtagcttaagtatgtaatattttttttctttctggaagtttatccttggtttttagaaattagccattgaggtgccaagggttagtcttcattcattgttcttggtgctcattggacccttttaatatagaggtttttgtctttcagttctggaaaattgtctcttttttaacttaaaaatcttcattctggaatccttaagcagagactggagtgcttgaaaagagcctcaaaatctatcttctatctctatgtttttactttctgggagatatttttaacttcatcttccattctttctgttaaaaatgtgtgtgtgggccgggcacggtgactcatgcctgtaatctcagcacttggggaggctaaggcagaagtgtcmcttgaggtcaggagtttgagaccagcctggtcaacatggtgaaaccctgcctctaytaaaaatccaaaaaaattagctgggcgtggtggcgcgcacctgtaatcccagctactcaggaggctgaggcaggaaaatctcttgaacccgggaggcagaggttgcagtgagccgagatcgcgccactgcactccagcctgggtgacagagcaaaactctgtctcaaaagaaagaaagctgtgtgtgtgtctcctcttctctccccagctcactctttgatcattttcatctgtttgttgttactgtctttacagcatctagccctggtattatgaatgttgtttcttctgctgactccctgagaatagtaaaggctttttttttttttttttttttttagctcttttataaagtagatttttgttccctgcattgcttctctttttttctggggttctttcttgttaccgctctttcatatagagactttctctggatgtctggtagcctctggttgtctgtacctaatgtggagccctaagcatctgatcacaagctgtgtttgtatgaataggacatgtttgaccacagagctttcctattgggagttgtctggtgcttttattgaagaccccagatatttgtgtccttagatttctgagagtatccagtttctctagataagaatcttctcttctgcctgggaggaactgatgatcccacccctcagtcacttagtcctcccccgcctgccttttcatctgttgcttcactcctgaaaccacgtttcttcatcctggggtgtgtgaaacttcctgagactttgcataaatgcttatgtttagtcacgagtttgttggtgaagactatgttaacaactttacagaaagtttggagaatagagaagaaaaaccccacaatcctaatattctgaataccatttttgtttttgtatattttccatatacatgttttttcaacatatttttgattataattttgtatcttgttttttccgccctcggaattttatccaaagcagttttctacgttgccactaatcgtcataattgttcatttcagtggttgtgtacaatgccattgatgagaacagcagttctcaaacgtttctgtctcagaactcctttaaattgaaaattgaggctgggcgcggtggctcacgcctgtaatcccagcactttgggaggctgaggcgggcggatcacgaggtcaggagatcgagaccatcctggctaacatggtgaaaccccgtctctactaaaaatacgaaaacaaaattagctgggcgtggtggcgggcgcctgtagtcccagctaccaggaggctgaggtgggagaatggcgtgaacccgggaggtggagcttgcagtgagccgagattgtaccactgtactccagcctgggtgacagagcgagaccccgtctcataaataaataaataaatagaaaattgagaactccccaaagcttttatttattagggttatatgtattgatagctgctgaattggaagttattacttaggaaacttaaaatatatattaattcatcaaaaataataatcctgttacatggtaatgtaaataacatatttttatgaaaaacaactattttccaaagcaaattattgaaaagagtgaattgtttaaattctttgcaaacccctttaatatctggcttaatagaagttagctgggttcctgtgtctgctctgcattcacactatttmagtatgttgttttggttgaagtgtataaagaaatgtagctacaaaaggaagggagcatattaataccttttcaggtgattgtggatattgttctttgacattataccaaaactcagcaagtggtttcttgggggtgggtagacagtgatgaatttttattcaaaacaactgtagtgactgacaaaaaaagttaaaacccagaatgatttgcttcaattaaaaattaattatatcccaagagcaggggtctaccaggttgtctgaggggaggggtgaactggcccagaaacggagcaggtcaaaattcctctgctgatcagtgggatggggattgggatcaagattgcttctgtgaatagccactgcctggggaacatagcgagatcctgtctcttaagaaaaagaaacagaaacttttggaaacaagcagacaagggtgaaagaaagccttggtgtaagatataatttatatattccatataagatatagaatacatatgttatataactaaaaagcataaaaacagtcagcatgcttttagtacaacctggaggtatggttaatgtgcaggaaaaaagctccatataagcctaatccctatatataaaaaatcacggaattccacagttttgaacatttttttttctttttgagacagagtcttgctctgtcgcccagtctggagtgcagtggtgcaatcttggctcactgcagctctctacctcctgggcccaagcaatccttccacctcagcctcctgagtagctgggaccagaggtgtgtactaccacatccggctgattttttgtattttctacagagacraagcatccccatgttgctcaggctggtctcgaactcctgggctaaagtgatccttctgcctgggcctcccaaagtgctgggattaaagggatgagccaccacacctggccaacactttttttgtgtgtgtggtaaaatacatacaacataaaagttataattttaaccattttttaagtgtgtagttcagtgacatcaactatatgtacattattgggcaaccatcaccactattcatttccaggcagatagttaatactcatttttttgtggtttctatatttgcaaatttacctgttcgaaaaaatttatttgtaacacccaaatcagtacagcgctttggtaatccttttcggacatatgcagaacggtgaaaaaatatgcacatccctagttgaggttcaacaaggggacactttgctttctttttttcagtctttgtgccgtaaaccagtgtcttttttgtgatctatttaatgccttttttttcatttttgtactttttgttgatgattttgccatttaaaatgggccccaagcatagtgctgaagtgctgtctagtcttcctaacgcacccttgagtgaaacttacctaacacctgcattttctttgtaaggcacatcatagccttgccatggataaaactctggacagttgagtttttccttgcactgcacatggctatggtgctttacaaagaagatgcacgtgttagaagtttcactcaagtgtgcgttacagtgctgtggctgtgaattcagtgttaaccaatcatatatagtaaagaaggtgttcttaaacagacacacacataaaacaaacttatgtattaatctgctgttgcaaaatgttgtgaccagaggcttgcagaaacctaacccccagaagcaatgatttcgtattcactaattcagtgagcacagtaactgcatagaatgaacaatgagaattgactgtagctccttttttgaaagaagaggcttaattatggagcaaggcatcaggaaaaatcacaggctttcctcatttgtgtgatttttttattttgttcatgtcttcaagagtggagccctaagaagaaagctgagagctcccagtaaaggggtgaygagtgcctggcttagcctcatagaggccagaggaacgtcggtctttacactgggacattccacacacgcaacacagagttattttctatggacagttgagtttttccttttccaagcatattctagggttgtctttctgtgccctgctacatgttccactgtactgctgtcagatttttatctcccagaaattctttgaagtcacttgtcttctggtggcagcccttcccttctcttggccattctttgtcatttggtctttgttcttcagtgggcctatcaggtggcaggacagagaaatgcatgtgatcaatatgccatctttaaccaatgtcctcattatggttatgaaaataacttttcatgtaattatttttattcaagttacatattacacacagtttaaagagtcaagacttgttaaaaaagagtcccctagactcactggtttccttrtctcccaggatggccacttttaatcttttaaagtgattctttagtcttttaaatgattctttcatactttataacatgcttgtagtcttacttgtttttcaggtttaggcattatctattgacattttatttaaagtcatcattgactttaaaaacacaaaaactctttactgaaatgtaacacaggttgggtgcaatggctcatgcctgtgaatcccagcactttgggaagccgaggcaggcagatcacctgaagtcaggggttcaagaccagcctgaccaatatggtgaaaccctgtctctactaaaaatacaaaaattagctgggcatggtgtgtgtgcctgtagtcccagctacttgagaggctgagacaggagaattgcttgaacccaggaggtggaggttgcagtgagccaagatcgcgcgactgcactccagcctgggcgatagagcaagactccatttcaaaaacaaaacaaaaagaaacgtaacatacataaaaagtgcccaaatcataagtgtacagcttgatgaattatcacaaagtaaacacatttgaataaccatgacccgggcaaaaaatatactgtgacccacaccctagaagcctccctttggcctccttcaaatcccttcactaccccacctcctcaagtgaaccactgtgccaccttctaataccataggttttgtctgtttgttgttttaacattgtactaatagaatgttagagtattttaataatagtgtattattttgtgtctatttcttttactctacttcatgcttgtgatattcttccatgttgaggttttcatttgtaaccaactgttgtagttgtttgacttggcctccrtttgctatggattgaatcgtatgcctcaaaattcatatgtgtaagccctaacccccagtgtgactgtatttggtgatagggtctttatagaaggttaagtgaagtcgtagtatgaatcctgattgatagggttagtgttattacatgaagagacaccagaacgctagctttttctaccacatgagaacgcagggagagggtggccatctgcaagccaggaagaaggtcccctccagaactgtgagaaaataaattactgttaagtcccccagtgtgtggtattttggttatggcagtccaagatgactaatgcatcattcttcaggccactctatccccctagaggacttgcagtcttttttttttttttttttgcctcctcttttactgactgagaatgttgttaacactttcagaaacagggtgttaggatcttttgaccgttggtgaaccaacagaaagtggaagataaggatttttctccagtgggtgtttgctgtggatttgttgggagaagcccatctcatgtatgagctgtcccatccctattttgtaatattccactttgctgctggcatcagagtgaatgtaaatggaatttcccagaaatttccacagcaagtggctttctcacttagtgagcccccttggtgtttgttgagtctccctttacccaaccccacaatcactggaataaaggggtggtcttctctccagtctacacctttctgaggcactgcaatcggggataccccagttaccacctcttttggtgaccccaaggtttcagctttgcctgagctctccaggctccagctctgggccaaggtgattttggtggagtcatcccagcggggagctaggaggaagaggggattaggaactcccgctcaggcttccttgctgcacgtacacatgtcacatcaaatgatggtgtttcactctggggacatagttgcttttgataaaatgacttttctgcagtttggttaagctgaatgaaacatatttgagctcctatttttgcttcagaggctattgaatagcagtacctgaagatgaaagtgtataagaacagaatcagtccgggcgcgatggctcatgcctgtaattccagcactttgggaggccgaggcgggtggatcacctgaggtcaggagttcaagaccagcctggccaacatggcaaaaccctgtctctactaaaaaaatacaaaaattarctgggtgtggtggcacgtgcctgtaatcccagctacttgggggaggccaaggcacgagaattgctcgaacccgggaggcggaggttgcagtgagccaagatcacgccactgcactccagcctgggtgacagagcgagaccctgtctcaagagaaaaaaaaaacgcagaatcagaatctttggaatagtgaccggatgccgtggctcatgcctgtaatcctagcacttcgggaggctgaggtgggcagatcgcttgagcccaggagtttgagaccrgcctgggtaacataaggagacctcatttctacaaaaaattagctggacatggtggcacgtgcctatagttccatctactcgggaggctgaggtgggatgatcacctgaacctgcggaagtcgaggctgcaatgaactgtgatcatgtcactgcactccaccctggacaacagaatgagacctcgtctcaaaaaaaaaaaacaaaaaacaaaagaatctttagaataggaggaggatattgagcagaaccataagaaactagtgattaagagtccaggtgtgaaaatagaaaccacgtctcagaagctcagagagaagaagaactggaaaggcagcatctttgatggatttggccatgaagaggaggaggaataaagcagaatggaggccagaaaagagtgtgtatgtctaacggtttcattggaattgggagatctaggtataccatgtaaaattacttatgaaggtaaagtttgaagaaaattcattcgactttgatttatataatttttaaaacctcattatctgttaaaacaccagaagccctgttttttggttactgattatgagtgttcaaggcctcagatcaactcagcatttatttatttatttatttttatttttttgagagggagtctcgctgtcttgccaggctggagtgcagtggcatgatctcggctcactgcaacctctacctcccaaattcaagcaattctcctgccttagcctcccgagtagctgggattacaggcccatgccaccatgcccagctaattttttgtatttttagtagagatggggtttcaccatgttggccaggatggtctttgtctcctgacttcatgatctgcctgccttggcctcccaaagtgctgagactacaggcgtgagccaccacacctggcctatttatttattatttatttatttatttatttatttatttgatggagtctcattttctcgcccaggctggagttcagtggcaccatcttggctcactataacctccgtttccaggtttcaagtggttctcccrcctcagcctttcaagtagctggtgggattataggcatccgccaccaagctcagctaatttttgtatttttagtagagacggggtttcaccatgttggccaggctggtctcgaactcctgacctcaggtgatccacccacctcccaaagtgctgggattacaggcatgagccacctcacccggacaactcagtatttattgagtactccttatgtgccagttagggctataaagatgaataagatgtcttttccccagttgagatatgcataagacagttcgtgtttgcctrtttcagtagtcagtattttcttttgcttattcagtttccactgaaacttatgttttccaaatacaaaattagaattccaactttgcgtttttcaggcgcacacactcgttttccctccactccttccccagttctgatttgcttcctcctgaaaatgggggttatagcccatccactccagggtcagaattgctggataccttgttgcagtgattttttctgtagctcctctggaggttatagactcatagggaataaataatgtggtcaggtggaggctttagaccaagttaagcagggtttttaaaacatggtgttaatgtacataatgcagccattctcaaaagtatgacatggggagacccctggaggttttctgagacccttttaaggagtctgccgagtcaaaactatttttgtgatactagtaaaacatttgcttttttcattctgtctctcacaagtgtagagtggaattttccagaggttacatgatgtgtgatatcacaacagattgaatgtagaagcttgtatgaaaatttcatacaaatatattatttgtgttataatgtgcttattgttattttgaaatcaattgttaaatacttttttttttttttttacagtttctcagtttttatttgtattttggtagatattcgttgatacaacccacatttgggggaatgagtaatctttaaaagtgtaaaagggaccaaaaagtgtgagaatgtttgatgtagagaaactccaagctcattccctggactttggctatagatgctttcttcaggggtgggtcttctgggcctgwgtcctgcaggatgcccagtaggaagcacagcctctttgatcttatgggggtgggctcatttgctgttttggagctcaggtgcaaagccgagttacttgatattccctggtcatggcaaagcctctctccacttttcttcccttctattgtcacttccattctttttccatagtccatagaaatcatttttaygtgacagtgatgagctgaccagaagctatagaagctatagtacttcctatatcctaatgggttttaaaaacactggctggggcatactcaccctttctgaacaaaggctgctaggtgaccctgctgttgccgctctgtatattcacttggttagcccacagattggtttggacctaattccctttccttctttaactgcccaaagggcttttctatttaaaaaaaaaaaaaaatttttttaaagttttcagattcaatacccacctatttgtatgcttacccatcccagagtcagctaaatttaaagtgtcagtaaattgtaaagaaaagatttgctacattgcatatgtttttagaagtgctttctgtgtataatctctctctctctctctttttttcttggtttggaggagactytccccttgtctataagtaacttaaatataaaatgttrtaacaatacrtttattagtttgaagccccaattttctttttttttttttcttttaagtgaaaacaagtttataaaagaagtaaagaaacaggccaggcgctgtggctcacacgtgtaatcctagcactttgggaggccgaggcaggtggatcacctggggtcaggagttcgagaccagcctggccaacatggtgaaaccccatctctactaaaaatacaaaattagccagtcgtggtggtgcgcacctgtaatcccagctactccagaggctgagggagtagaaactatgaaaacttgggagatggaggttgcaatgagccgagatcatgtcactgctctccagcctaggcaacagagggagactgtttcaaaaaaaaaaaaaaaaaaaaagaaacaaaagaatggctgctccatagacagagcagcagtatcagctgcttgactgagtctacttatagttatttcttgattatatgctaaacaaggggtgaattattcatgagctttctgggaaaagggcagagatttcctggaactgaaggtccctccccttttaggggactatttagggtaacttcccaaggttgccgtggcatttgtaaactgtcatggtggtggtgggagtgtcttttagcatgctgatgcattataattagcttataatgagcagtgaggacaaccagaggtcactttcatcgccatcttggttttggtgggttttggcctgcttctttaccacatcctgttctatcagcagggtctttgtgacctgtatcttctgccaagctcctcctatctcaccctgtgactaagaatgcctgacttcctgggaatgcagcccagtaggtctcaggcttattttacccagccccttttcaagatggagttgctctggttcaaacacttctgacatatttcccccctcccttttacagggggacccttaatccttaagaattgtagcgggacaaagatcatctgtaacttcttcaagccaaataggggtgatgatattcctgcctattagggtctcttgtatttagggtagggagaagtttagttagaaagcattgttatagaagcccttattttcagttacacaattttataaagttacaattgcttattgtaaccagctgagttttaggttttgtggtttgttgcttgcttgcttgcttgcttcttaatgccatatatcttggcatttatcagtccataattactaaattcttaaaatccataaatrtttattattctttctaggttgcaataaaaataattgacaaaactcagttgaatccaacaagtctacaaaaggtaagattggttcaatgtctagtactttttaaaaaattatcggtgctaattgccatctaatttgtcccttaaataccccaactgttattttatgtttaatgccataaagcttcctattcctcaaatgaatgcaacttaatgtagtatttcatgaaaaattgttgggttatctttggtcggagattatttttaaatgttcttaacagcacaaactaaaggctgtgctttttttttgtacttttytattgatatagttgtacgaggctgtactttttattgaatattcttaatattgactagagtttttttaaaaataatacagtacaaaaatattttcatgtaattgatattgtgcaaatttgtaccttatagctaatactgaaaattttaaagtgaacactttggcttccttaaactcttgacacaccacatctgattaaggactgatgattaatataaaagggaaatgttaaagtaaaactgaaagtggaaaagcatgttcataaagcagtattgccattagtatcatttaacatagatcaagtctttgccctagtgccttttagaatcacctgggcagatttttgaaagtcttaacacttacataataatgcctaagcaattaggttgggcccaggcataggtatttcagtggtaggacatcagcaaataattaatgatcttcataataaaatccttctagttgtttttagcttcgcagagtctttttacatacttcatttgatttctagatttgacctgtagtagttgaggggggtacagagaccatgaagtaggaacaggaagtactgaatttcagtcctggctctgccacttagccgaatatctgaccttgagcaaggcacttaactttgctggaccttgggtttctcatctttaaaatggagataatttcatcttcttatgatggatgtgagtattaatgaaataatgcatataaaagggctttgtaaactgcacagcactgcacagttgtgcgatattttgataagagyagtgctctatatacatttctaatgtattcctcatggttatttatatyctggtaattttgaagccctgtccctgttttgtgtttgggaggtggggagggagatagactttctctgcrctaaaaatgttatttcaacaagtggttctttgtgatctgcaacccataatgggccttaaggcttctcaaggtgggcatgaaacatctaaaaattccagtcctttgtcctgaagagtaaattttatctatttccttaaacttccatatcttcagctatctaaggatttggtactaataaatacattagagtttaatacaatgtggtattcagaactaaaattaacatacaaggatgtttaatgaggactctaattgagtattctatgatgttacataccttccactattcatgtgtacctggatataattgtaatcctaacagttttcccggaaaaatttttaccatggtgttgtatcaagttggctgcagtttttccttcttgtttgcttgcttcctttagtcattttttattttattttatttttttggtaatgatttttcattgctgctcttcgtttattatttgtcacatcattatcagtttagtgcatggtagtttggttagcccattagtgtgattatgcatatttgcatctgaattaattttgacttataataataattaaaactttaagatttgtttttggtattattcaagtatgaaccattcactgaagacttattctaaagccagctctatcccaagttaaataacttgataagtataatattttcagtttataggccattgtttaaaattgtgtatataacttcatatgcttatgaagtaaattagaagcattttacatacatttgtttccaattctttttcaccaagtatcttatccccagcccccccatcttcccccacccccagcaattttgcaacaatgtagaatgtaccaggcaactttgtcagccccctttgcagtcattcttgcatccttttttcttctcagcaccattcatagttgtatcacacttgcttcaggaacagctctcttagatagtgatttaaagctgtggagcatgccctagcagctaacattcatcataaggaacattctgccatcagcagtgtgcaatctcttttttaccaccactaccgaaaaaggtggactggctcattcaggcagtattttaacagtgaacacacgtgttaaaatatcggtttcatgatattcaggcttgcatactgggtcatgaacatttactaaatgcacatataagtaaacctgagttgactatgtttgcaaattgatattattttcacagatgagtctcttcatttttcctttgtatttttgcagccattgaattaataaacgttagattctggtgagagatttatttttctccattgttttttaagagatgggtcttgctctgttgtccaggctggactcgaactcctgggcttaagcagtccttccactttagcctcccaagtagctgggactacaaatgcacaccacagcatctggctatataccttccaatgtctcactagtatatctggaatactattctattcttacgcatcttttaggtcaattttttgtttgttcgtttgtttttgtttttgtttttttgagatggagtctcgctctgttgcccaggctggagtgcagtagtgggatctgagttcactgcagtctccctctgcctcttgggttcaagcaattcttctccctcagcctcccaagtggctaggactacaggtgtacgccaccacacctggctaatgtttgtatttttagtacagatgggggatttgccatgttagccaggctggtctggtctcaaactcctgacctcaggtgatccacctgcctcagcctccacttgctgggattacacgtgtgagccaccatgcccaggccaaggtgtgtggatcacttgaggtcaggagttcgagaccagcctggtcaacatggtgaaaccgcgtctctactaaaaatacaaaaattagctgggcgtggtggcacatgcttataatcccagcttctcaggaggctgaggcaggagaattgcttgaacccaggaggcgacagaacaagactttgtctcaaaaaaaaacaagaaatttgtaacatgtaatgaaataattgattttttgtaatgtatttatgatagctggttagttagccaaccttgagcacattcagggatggagacacactccttcccgtagcatcttgttccagtgttcagtggctttgctattagagccttttccccttacttcagactagcatctgtcttctagaaacttctacaacactgtttaccatttgtcatatggagttatagttactccaaacataaccagcccttagaagttgctattttgggtcttgttgattttctcttatgcagagtaaatcccctcagcctccttgggtactcccacaggagtttcgctgaacagaagcctactttattccatacttggaattgttyccccccycccacctgaatttgtttgattcctgctaaaattcatttaattgattttctgccttaattccagtcttttgggggattttggaataatgggtcatttgtattagctgctatgtaaattagatatggatgtctccatccaattaaaatattaaacaagacaagaacaagacttttcaatggagaattcatccaagttgatactgctsacccagtagtaaagcattttttgagtaagatttaaccaccattcttaaatctagactgagtaggacagaaagggaaatccctgtgtttttaaattttaatgagatttacagaggaagaaaaaaaggaacattaaacacaaatatatgcaaaatacccagtaggatttattaaagcattattgactatggatttcatcagggtctttgtggggaaatcctgcttatacccacctcaatcttcctccctcccttccttccactggccttatcgtgattgtwaaatagggcaacactacattccataaaatagaataagtgtccctatgagctgagcagaagttggctttagagacaggcaaaggctgaagaaggctgaggcaggcccggcacagtggctcactcctgtaatcccagcacttggggagcctgaggcgagaggatcactcgagctcaggaattcgagatcagcctaggcagcacagagagacccgtctctaccaaaaaaaaaattaaataaattaaccaggtgtggtggtgtgtacctgtagttccagctacttaggaggctaagatgggaggatcacttgagcctagaagttggaggctgcagtgagctgtgatggtgcccctgcattccagcctgsgcaacagagcaagaccctgtctcaaaaaaaagctgaagcaaagaacaaagagtgtattggtcctttcagaattccttttttttgtaaggcagggacagggaaacagaacaatagaccacaatagactataccacatagaaaagtaaccgattagttaatgtcaggttacttcacactacatttttttctgtaaggattaaagcagtaggaactttgttattgtgccaattgaagttttttcttttcttttcttttctttttttttttttttgagacagagtcttgccctgtgacccaggctggagtgcagtggtgtgattttggctcactgcaacctctgcctcccgggttcaagagatacttctgcctcagccccctgagtagctgggactacaggtgtgtgccaccacgcctggctaatttttgtatttttagtagagacagggtttcaccatgttggtcagactggtctcccaactcctggcctcaggtgatctgcctgcctcagcctcccaaagtgctgggattactggcctgagccaccgtgctcagccaggacagtttaaatcttcaatcaggggctggacgcagtggcacacgccaataatggcagtactttgggaggccgaggcgggtggatcacctgaggccaggggttcgagaccagcctagccagcatggtgaaactgcatctctactaaaaatacaaaaattagttgggcgtggtgacataccccagctacccagtaggctgaggcacaagaatcgcttgaacctcggaggcggaggttgcagtgagccgagatcacaccactgcactccagcctgggtgacggtgagactctgcctcaaaaaataaataaataataaactgtcctgtttgggaaattagctgttatctccttttcttctgatttctaggaaggtcagataacaacttaatttaggtttgggaatgtggaatcttagcagggattactccatttttaattttaacctggtttcctggggcctaatgcaggagtttagtcccaaacaatggcttcctataatttttatttaacaattcttcccttttggtcaggctttcacctaggtaagagtgtaaccaaaacctaggatatccctgctgttctcagttgccatcattttgagtttcccgtttcagcatgccgttgacagggtgttctcattatcgtgtgtttcttttgagtttttgttgttctagccagagagaaccatttgacatctgataggtggctacatggagacacttaacactctgggaggatacagcgtaccagagagactrccattatgactatcatgaggatcacaccaagcatttagagtatgctcctaagccagggtttttatgaaccaaatcaactaaaattgtatagccaaacaaggagtctgccaattttaaccaagttgtcygctctaccatacccaaatcgcaacgagaartgtcatgaactgcacagattcctccatgtttagtaggcatcccagcattccgtgaccgggctaagtataaagcagggagtgcaagttacccacagaagctactgactgtgaaattttagctacagcatgatcctgccaaactgaaagaggtaggcattagtaaggaaaaattaagaggggcaaaagcmttgttatgaagtcttgttattatgacagtcttgggaaaagctgtccatagcatgcagtccacaacttctcgtcctggttcgcagtttgaatgtctctggttgtggcatctggcattctggtgaattctctgtgtggcctacacatcaggcatgagactcgaaatttacatcaagctgtcagctttggtttatagggcttctgaaattgagcagctcattcttcattggcaagttgtagccagatattaaagaaaactrgaagaattcagaatctagttcagtcaggaataatcttatcaggtcatttctggaagtcaattctgtgaattaatattttagcagcgttttttgcttctaatttcaaattggaaggtatagggttattcattgtgcccctcaagcctggtccactccgatacccctcaagcaccagacacctacccaggaagagggaggctgttttctttttaaagctagtatttgctttggagccactgttagtgcttagagctctgtagcagtagcagtagtggccttttttggcgtcctagggaatcttggtcatgggatgtagcagggaaacttataatttgaaaacaaggagaaccagttcatgcttttcatgtggtctgtcgtgtaatgacttttactgctgccaccactgggttattttgggcactgttgatttagttttcttaagccagtacttttcaacccttcttgtgcattagaaacatttgtggagtttgaaaaaagcatatttccttcacagtactttcctccctagaggtcctatcttggcgggtctagaaatgtggtgatctcagtacacaccccagatgagaatggctcctagtctgtcttcacttcccccaaagttcttaatttctctcttcttccaattttacttatttttatttatttatttatttttttgagacggagtctcgctctgtcacccaggctggagtgcagtggtgcgatctcagctcactgcaagctctgcctcctgggttcacgccattctcctgcctcagcctcccgagtagctgggactacaagcacccgccaccacgcccggctaattttttgtatttttagtagagatggggtttcaccgtgttagccaggatggtctcartctcctgacctcatgatctgcccgccttggcctcccaaagtgctgggattacaggcgtgagccaccacgcccggcctatttattttttattgattgagtgattgattgatggggtcttgtcctgttgcccaggatggaaggtagcagcaagaccagagctcactgcagcctggaattcctgggctcaagtatctttccacctcagcctcctgaggtagctgggactataggcgcgcaccaccacacccaactaaagtaacctattttatttatttatgagacggagcctccctctgttggccagcctggagtgcagtggtgccatctcggctcactgcaacccctgcctcccgagttcaagtgattctcctgcctcagcctcccaagtagctgggattacaggcacccgctgccacacccagctaatttttgtatttttagtagagacagggtttcacygtgttagccaggctggtctcgaactcctgacctcaagtgatccacccgcttcagcctcccaaagtgctgaattacaggtgtggccaccgtgcccggcaaagtaacctattttaaagatgaccccttccccaaatattctaagtttcatagacagctgctactgccactgccactgctgaatattttctccctctctggaactcttcctaggaatgccttagtacccagttcctggcctcctttctctattgggtgaagcacaagttattttggaaatccttttcattgaacaactcttttcatctttttcttttctttcttttttttttttttccaactatctttctctttcattttcttatattgacttttcaggccattaacaaaagtagtaaccactgtaaaaatagttgttacagtcttgtctgttatttaaaatccagtgtctgcattcacatcagtgtcataaatctgataaattaatacaaataggagatggcaaatgaaatccaagacaggcacttcttatattgattgattgaggctgggtcttactttgtagcccaagctgaagtgcagtgtcatgatcatagctcactgtagcctggaacttctgggcttaagcartcctcccgtcttggcctcccaaagccttgggattataggcatgagtcaccacccccagcctgattatacatatttaaaatattgagaatagactgggcacggtggctcactcctgtaatcccagcactttgggaggcccagctgggtgggatcacctgaggtctggaattcgagactagcctgacgaacatggtgaaaccccgtctctactaaaaatacaaaaaaattagccaggtgtggtggcgcatgcctgtaatcccagctacttgggaggctaaggcaggagaatcacttgaacccaggagacggaggttgcagtgagccaagatggcaccactgcactccagcctgggcaacaaatgagaaactctgccaaaaaaaaaaaaaattgagaataaaactgtatatatgtttgtttatttttagatttcaaaagagaagaaatagaaaaaccggctttcagtattgttgcttctttattccttataaacttttaaatttcttgccagacttatttttgttttggcaataaataatacgggttgatatttagaatacattataaactcgggaagctgaggcaggaaaatggtgtgaacctgggaggcggagcttgcagtgagccgagatcacgccactgcactccatcctgggcgacagagtgagactccgtctcaaaaaaaaaaaatacattataaactgagaatagtagagtgtattttagagattgattgtttgtttttagaattgaggtctcactatcttgcccaagctggtctcagactcctgggttcaagcatcctccttccgaggattccaatctgccttccaaggagctgggattacaggcacacaccaccatacccagctaaagtatatttttcattgtaccaaggactyattatgctattttagaaaagtcaccaaggaaccaagtattttaagtgggttaaacttagagcatagcctggacccatttgcagaaaatataaacttgggtgcaaatkaggcctttgtgagagaattataacagtaacatcagccagaatcacaaacacatgtcaggagtttattgtgtgccaggtgctgttccatgcactctgtatgtcaagccatcctttcattgtagaggtgacagggtcagggaggtcaagttacctagacttagtgagtggtacagctgggttgggattaggtagtatagctcctggaatcaaattctacacacactttatcttatagcattgcatgtacttttcacaacagtcctgtgaagcagttgttttctttttttttctttgagacagagttttgctcttgttgcccaggctggagtgcaatggcgtgatctcggctmaccgcaacctccacctccctggttcaagtgattcccctscctcagcctcccgagtagctgggattacaggcacccgccaccacgcccagctaatttttttgtatttttagtagagacagggtttctccatgttggtcaggctggtctggaactcccgacctcaggtgatccacctgcctcagcttcccaaagtgctgggattacaggcgtgagccaccacgccaggccgaagtagctgttttcaaaatctatcttataggtaagtaggttaaagctctcaagattttgtggtttgttcactcatccagtgaataagggactgaactagccttagaacctaaatttataacatcaaatagctttctttgcataagttcccttggagccagtcactcatagtactttccatatgggaaggataacaaaggaamatatggaaattcagcttgcatgtggtagatacctagtaaaatctgataagttaattttgttagtaccaaattcattttaacactaaattaatttttcctgatgttgctctgattctaggaatcttgaccaccagaaccttgagtttgggagatgggaagattcttagtttgtctttgaaatatttgatcataaaaaacacattattggccaggcatggtggctcaagcctgtaatcccagcactttgggtgaccaaggcaggcagattgctgagctcaggagttcaagaccagcctgggcaacatggcaaaaccctgtctctacatacagaaattagccagatgtggtggtgcgcacctgtagtcctagctacttagggggctgaggctggaggattgcttgagcccgggaggtcgaggctgcagtgaaccatgttcatgccactgcattccagcttgggtgacagagcaagactccttctctaattaaaaaaaaaaaaaagcacacacattgttgctactcttattttacatttttagaaaactgatttgttgtattactcagctaaagctaagcaattttttaaaatttagtttttaatttttattaaatactgactgcatacaaaagaatgttccatgtttagcatataaatatgtatatgagatgagcacccttatactacctgcttcaagaaatagatcttcaaccatacctttaaaccagtcccatattgtgcccctcctcaacctgattccccttcttcattgcccacctactgggtaaacactaacaaggattttgtgttattattttcttgctttgtccgtgtaattttaccacatatggatcactcatcaatgtagtgtaaaggtttttttttgtctgttttttgtttcttttgtgtttgtttgtttgtttgtgactgagtctcgcactgtctcccaggctggagtgcagtagtgcgatctcagctcactgtaacctctgcctcccaagttcaagcgattcttgtgcctcagcctcctgagtagcagggattacaggcgtgcgccaccacacccagctaatttttgtatttttagtagagaccaggtttcaccatgttggccaggccggtcttgaactcctgacctcaagtgatccacccacctcagcctcccaaagtgctggaattacaggcgtgagccaccgcaccccaccaatgtagtgtaaagtttaaaaaattgtataaatggactcatgctatgtgtattctcctattggcttttgctttgcttcctyttttttgtttttttgagacggagtttcgctcttgttacccaggctggagtacagtggcgtgatctcagcactgcagcctctgcctcctggattcaagtgattctcctgcctcagcttccaaagtatctgggattacaggtgtgcaccaccacacccagctaatctttgtgtttttagtagagacgggttttcaccacgttggccaggctggtctcgaactcctgacttcaagtgatccacccacctcagcttcccagagtgctgggattacaggtgtgaaccaccatgcccagccgcttttgctttcttttacctacattgtgttccatgttgatgtattttgctgtaattcaccttcactgctatgtccattttcaagaatatgtagtatcccattatgtgaatatgccactctgtatttattctgtgattcagagacatttggattgctttttgtattgcaaacatgactgctgtgaattgtcctctgtgtgtcctggcacacttgtgaagagtttcttaaatatatatacttagaattcttgtatcacagagtctgtctgcacatcctccttcttcattagagaaggccaaattattttcagagcaggtatgctaatttatatttccatcagtagtgtgtaagagagcacaagtaatgtagcatcctcatcaaaatttgattttctctgattttttaaaatttgtgccatcacaggagaattgcttgaacccgggaggtggaggttgcagtgagctgagattgcgccactgcactccagcctggcgacagagcaagactgcatctcaaaaaaacaaaaaaattgtgctatcaatttggtaaatataaaagtgatatttggccaggcatagtggcttcctccttaaattccagcactttgggagcctgagatgggaagatctctccaagccaggagttcaagaaccagcctgggcaacagagcaagactctgtatctacaaaaagattttttttttttttaattatctgggcatggtggcacatagctgtggtctcagataattgggaggctgaggattgattaagcccaggagtttacagctgcggtgagctgtgattgcaccactgcactccagccagggtaacagagcaggagcccctcttaaaaaaaaaaaaaraaaagaaaagaaaaatctcattatggttttaatgtaacattttcctaattactgatgaggtcatgcattttttcatatttaggttttttgtttcttctgtgaagtacgtattcatcttttgtttaatttctagtggattttttcttagttattttaggatatcattatatatcatggatactattatatatgtggcacacaccttctacttgatggtatatcttcactctcttgatactgtctctcagtgaatagcagaggctcctaattttaaagcagttacatttatcagtctttttttaatatgctttgcactttttatgtcttttttgtttttttgtttttttgtttttgagacggagtttcgctctgtcacccaggctggggtgcagtggcacgatctcggctcactgcaagcttcgcctcccgggttcacgccattctcctgcctcagcctcccgagtagctgggactacaggtgcctgccatcacgcctggctaattttttttgtatttttagtagagacggggtttcaccgtgttatccaggatggwctcgatctcctgacctcgtgatccacccatcttggcttcccaaagtgctggaattacaggtgtgagcccccacgtccggccttttttgtgtcttctttaagaaattcttctctacctggggtcataaacatatttttctctgttgtcttcacatgtttaaagtaatctttaagccaccagcagtcatgtgttacgaggtagggatccagtttcatggtttttcgtatgtataatcacttgctgcctcacctctcctttctttgctgatctgcatcgtggacagagtctccgtgtctaaacrcacactttgttcttcagaagtggttattctggttcacttaacaattgccatttgaaaagcaattatttttattttattttcatatttttaaattttatttttaatgataggacaccaaatgataaccagaaccccaaaatacataggtgaaaatctgagctaaattaatagaaacacaggcatgacagagaagactttatcacttaactctcttaggccattcattaattacacagtaagtagggggaaaaggtacatatcttaatatacagcacctccatggccaggtgyggtggctcacacctgtaatcccagcactttgggaggctgaggtgggcggatcatgaggtcaggagattgagaccatcctggtgaacatggtgaagccccgtctctactaaaaaatacaaaaaaattagctgggcgtggtggcgggtgcctgtagtcctagctactggggaggctgaggcaggagaatggtgtgaacccggggggcggagcttgcagtgagcggacatcgtgccactgcagttcagcctgggtgacagagtgagactccgtctcaaaaaaaaaaaaaataacagcacttccattagcccatagtatagctgttttaatccccttttcaggatacataacagctgtgtgctaggatattatcgtcataactattccaatgtgtgatgactatgaggtatattattttctcagagttgggcwatacataacatttgaataagccagactaacatctttctaggctatagttctaatgtagagcaataaaaataraaccaaacaaaatatacaaacatgtggaacctaaaacacacagaattcttggatcaaagaaaaattgcaaacaaaaattacagtatatctaggaattaatgataataagctgtgtgtcagaacctatgtaatactgctttttggtgctccgggaaatttgtagccttaaacacattattaaacaagaatgacaaggaatgcattaaacattaaactaatagtttagaaaagggaacaaaataaatctcaggaataaataataatgtaagragtcagtaaagctaaaggcagaaaataatgaatttgaaaacagtagaaatggtaaatccaaaactttggtgggtgtcycccccccycccaccgacaaggaagtgagaaragaggcaatgaaatagataagctactaagtgctgccagggggaagggagagaaaacacagaaaaatgagggggaaataccagatactgaagaatttaaattattataaaggaaccttttctgcaactctgaaaaatgttagaatatccaaagaaattgataattttctaggaaaacatgacttaccaaaattaactctagaaaagaatcgatacacatcagtaacaacagaagttgagaaagtagttaacatattgccaaacctggaattcatgattgaattctttgagatctactgtgagtacatactctgcctctgttcagctgttccagaacttaagaagaggaacttccaaattcttttctcaaattcagaaacaatgctattgaaatatattggaaacaggaacgaaaactacagttcagtttcacttataatatccattctaaaattgggaattaaaaatactagcatataggactaaatactggtacatttatctttgtttccccaaagcattcactaaatgatggtaacggaattaaaaaggaggggaaaagagtccaggaattgagtactgaggcattctcaggaagagcaccaagagagggaggagatacccagcggtcacagtggaagtcgtctttgagacttagagcgtttgaggaaggggtcgtctttaaaataggttacctacctagcacttgggagaccagaccagcctgtggcaaccagtgacatcagttcctttgagtctttccagagatactctgtatattaagaagcaaatttttttttccttttttacacaaatgcattttcttgaaaattccttctcatgaactttgccagcctctctgtcttggtttgtctgagagggcctttgatgcactcttccatttaggtgctgtggtagttgaggcaaagggacagtttctgtagagtgatgagggagtgacttaggtggcctggtcttctgtcccttatctgtgtatctggagaagggagcctgaacaccttcattgtgatggtttagatcagttttatgtctgtaacccccgtgttctcttttacatactcattttactttcgtatcggttggtaaaattgtctttttttttttttttttttactagagactaaaattctctctctcttttttttctacttgtcaaaaggtaaaattttatttttccagtggtaatacttgacaacccccaggtcttggctattgggacatgtttctttacttctctgataccgtagatttagtgtccttgatatccccattgccaggattccaaatctttgccttcaaaggtatttattctcctcttgtgtgccagttccatagaggatgtatagatgtgaaaatgtgtggaggatatagattgatcagtaaggagagaattctttcaatttatacgtttccatgtaatttgatttcttttttccaactaacatctatttaagattgaaaagggaatgtggagaaataagttgtattaagatagtagaaataggctgggcgcggtggctcacgcctgtaatcccagcactttgggaggccgaggcgggcggatcacgaggtcaggagatcgagaccatcctggctaacatggtgaaaccccgtctctactaaaaatacaaaaattagctggacatgatggcrggcacctgtagtcccagctactaaggaggctgaggcaggagaatggtgtgaacctgggaggcggagctttcagtgagccaagatggcgccactatactccagcctgggcgacagagcgagactccatttcaaaaaaaaaaagtagaaataaggtgagtttctcttatttaaatggccttttacaattacaaaacttwaaaatttttctggtatagtccttatagggactttccttaaagttcacatttgcctttcagtacattattcctatccaaatttaactatctttggtcatcagattctgagattatgaagtctctggcatttttatctcacttgtatgcaaattgtcaacttcgtaaaaagctctgtgccagtacccacctgttgctctggacttttctatatcagcagcttataatttgttgatttttttttttagttaaatttctaaggtagcaatgtggaatcctgagatgaacgtagactttggagtcaggcaacccacaatgagaatcctggctccagcatatattagctgagtctttggatgagtttcctaacctgtctcagtcgtctgtctctgtatactggagatgatcatactcagctgatagagttgtgaaaattaagcttagataagactgtgaatgtgaagcatctggctctatgcgtcagacacagcaggcactagataactgttagcttcctgcttcctccctgtcctgcttgtttaacttagcataaagcttatttacacatttgctgcctgccagtatctacctaatacataattccaatagagaggtgaatacataaagttatttgggctaatatcctgccactacctctcttgggattctttggctgctctttttgcctacggaattaaatttttactagtcttctatctggtcccatttacctgtcctttttgttttcacattgcatccctggtatgacctctgctgtaactcaggagttctcgcattttaatatggtgtctgcagaatattagttatccactgctgcctaacaaattcctccagaacttagcaacttaaagccaaatcttttgaattcctgtaatagtccatctttttcctgctttttggctctaattcactttgtttcatttctgctgtactgttagtagagacttaaaaatgattgccttcatttgacctgctcccctgtcatcagaactgtgwyaactctgtaacaagcattgtgctgcggaggatttaaaagctatgtggtcattagaatgctgaggctggctcagaccgcagttgttggtagttagtgctttcatgcaggcatttatcaaacaaatgcatttcagttgtgtgccagccttggtttcaggtatacagtagtgaaaggagacaggcatgctccctgtgggtgacacaaggataacaaacaggtgcacaaaaatgtgtcttcatagcttgaaagacatcccaggaaagaagtgaacagatgggctatgatgtaaaacaaggagacctacttagatacgttttcagagaatctgcctgagacttaaaggatgaaaagggagaagacatttaaaggaatttagtatgttctgtggccaggcgcggtggctcacatctgtaatcccagcactttggaggccaaggcagacaaatcacctgaggtcaggtgttcgagaccagcctggccaacgtggcaaaaccccgtctctgctaaaaatacaaaaattagccaggcatggtgggacctacaatcctagctgctctggaggctgagacagaagaatcccttgaacctgggaggcggaggttgcagtgagccgatattgtgccactgcattccagcctgggcatcagagtaagactccgtctcaaaaataaataaataaacaaacagtatgttctagtaactaaaaggagttggggtgactagaacgtacctttgaggggtatgcagaagttggcaggttgcagggatgccatggccatggtcagggtttcattctcagtgctgtgtatcctgagctatattgatatggcatccaaagtggagattgttgtctttttttttttttttttttttttttgagttggagtcttgctctgtcacccaggctggagtgcagtggcatgatctcagctcactgcaacctccaggaggtgttgtaatttagcagttgggaagtaattgggagatttgaattctagctaccaattcaactataatggattggaaaacaagatttctgtgttagtttaacagaggagagctaaaaaagaactcaggcctgaatggttgtcaggaatttacttgggtgactatcttctcatctcagaacataaaatgtaggaattaccacagttgcaaagggagatgtttatgttggagataaaaatgctcctcccttcaaaaatgagacagtattttagataggaaaggttatttatctgattacatgttttaaaattctgagcgtaaggttatatgtcaaatcctgtccatgggctgggcacagtggcccacacctgtgatcctagcactttggaaggctgagggggaggattgattgagcccaggaggtcaaggctacagtgaactatgatcacaccactgcacttcaacctgggcagcagagcgagaccctgtctcaaaaaataaaaataaattaacaaaaaaatctggtccatgtccatctcctcttagctgctaattcaattttagattagacacagtggacaaggacaagtatggtgagagtcctgtgatttctcaccagcttcctttccacataggccgctgcttctcttcttccaaggtttttccccgcttttgcctcctggaggttgtatcctgggtgttaggagactgggttccggacacattccccacagaaggatagcaggaccttagaagatctttttctttcttttcctggtttcctcttgtttgcaagagggttgaataggatggtctctaaaatcctgttgtttttctgggttatattaacccaggccataatgataagaacctgctctgaattcacaacatgtatttatacaacagcaatttaatatttcttattctgtggaatggctaggaagctctgctggtcttggttggatggttttttgtttgtttttttttgagacagggtctcgctttgtcgcccaggctggagtgcagtgacgccatcagctctctgcaacctccacttcccaggctcaagtgattctcttgctcagcctcccgagtagctgggactacagacacatgctactgcacccagctaatttctgtatttttagtagagatggggtttcaccatgttgcccaggctggtctcgacctcctgagctcaagtgatccacccaccttggtttcccaaagtgctgggattacaggtgtgagccaccgtgctcggctggtttttcttaaggtctcacctgggttcacttgtgtggctgaattcagctggtggtttggcaggggctggatgcagttacaacagaggatctgtctctttaaataactacccttcatccccaaagaggccagaccagctccttcacagtgctccaagagagcaagccatgacgcccaagcattttatccagcctctgcttgcttcagtttgctaaggtcccactggccaaagcagattacatggccaggtctaatgtcaatatgaagggggcactccacaaaagcgtgaacatgtaaggcatgactcatgagggtcactaatgtaatagtcaccacaacctccatgctaagttacctatattctccagtgaggatttctcaaggtggttttgttcatagtcttctaatagaattatttggaattatcagtttaatatgcttatgatgtatttcactggaaccatacaggttttgattcgcagagttgggagccctgggtagatactgaatcagactaagtttaatcacagaaattattcctrcgtaagtctgatcttatgttttcaagatagcattgtaaaattcagagtatgttaccatccccctttgagacctctgctgtttttaataaatggaagcatttgggaatactatttggtaatagtttattaaaactacttcagagatattctggactttcatattagtcttagatatggattaataaacattagcaatgaatctgttatctaagagaaaaatttaaatttatattacaacagtggaatataatgtttaataacttgtgttggggggattatgtgttttgtttgtttttttttttagctcttcagagaagtaagaataatgaagattttaaatcatcccaatataggtactttctgcttttttaaatattttggggtctaaatacgtacttgaaattatgtcataaagctaaacacgtattctagaaatggtagagtacacttctagtaaaatatatatacaagttgttgatcatttgtattagctttttgaaattgctgaagacaggttaaaagcttaggtattaaacgttgaatttaaagctttaatctggtagaaacatctgtactctgattataattttctaatttttaagtatattagaaaatataattgtattgcatgagtagatagaagggaattataggaagtcagaattaatattttcaaaggggctgrgcacagtggctcatgcctgtaattccagcactttgggaaaccaaggcaggaggattgctggaggtcaggagctcaagaccagcctaagcaacagagcgagaccccgtctctccaaaaaaaaaaaaaaaaaaagtaataataataataaacttaaaaatttgtaaaaagaatatttcagaggtccaatactttttgctgtgtgccctaagaaaatacttatttgaaagatggaatacttgctatctaatggaattgtgataggaattattttrtaaatcaaagatttgttttctgtgtcctctgtgtgcacaactctgtgctgggtgctagtaggtgtgtttaaagatgaggaaggagcgacatggtcctacccttagagtaactgtagaaacaagaagagaataagcaaatgacttaatactgacccaagaaaaacttttgatcccatatgcattgtaatagggcttttaaaaaattacataactgcttttttgtatagtgatagatcatacaatctaaaaataatatttcaagaatgaaatcactcttaagacagcccataatcagcttaactgtcaacatcagttttaggaaatgaaaggattgatgtttagtatcaaggatagcctatcaagaatgcatcaggcacaagaatagaagagtaacacagaaccaccacaggaagaaagaagcttttacagagagctgcttttttaacaaaaggcgtatgccctatttcatcagtctaaaccaccattactttaaaggtgttcttgtttccttgtttcatatactactaagagaaatgctagcaagccttcatcctgatatcagggatattrattaaaatgtgaaaaaaaaatttagaatcaataagtatggttgaagaaaaaaccacggaacaacttcatagttggattaaaaaaaaatcacaaggaatataatagtgggaagaaaatcttgtttccttgattttcatttcaatcctttggggctagctagccaactctggatttcaaattccaacttttcacacccgtcctcccgccccccacaaaaaaactttatcactgttgcctagaacaagctaacgtaaacatgtttattttgtcttttaattacttaaattgtgacctgattagagttttgtacttaaaacttgacatatctttgataataaattgaacttttaaaaaattcctattgcattaacatagttttcccagaagacccaaagtttcgttggaagattagaagagttttattttcatgcagcttaccaacacatgtgccttaactttctgaagtggcttttcttcacagtctgaacgtatcagagtctagggaatggtatgatagctttattcatcagttcatcaaacatttactgactgctatgttaggcattttgtttggcctgatactctattaaagcctcagaaaattgcttgaaatataaaacactagcataccccccagttttgggtaaacttaaagtaaatattaacataataaagtagatatgcacaatggtgatttgatagcttcagggatttactccagtttcatttttaaagtgtgtgtgtgtgtgtgtgtgtgtgtgtattcttttttttttttttttttttttttgagacagggtctagctctgttgtccaggctggagtgcagtggcatgatctcaggtcactgcaacctccaccacactggctcaggccattctcccacctcagcctcccgagtagctgggactacaggtgcatgccgccatacccagctaatttttggcatttttttgtagagagggaattttgccatgttgccgagggtggtgtccaactcctcagcagaaacgatccacccgcctcagcctcccaaagtgctgggattacaggtgtgagccaccatactcagccaaaaatgtatatatttctaataaggttttatgaattagcagtgatagaaatatttccatctgtaacaaaagactgctgtaggaaaatcaccctgacctactgaaaatgattcttataaaaaagattccccccctcaattaattgcagtataatccctctacttctttccatctttggcatcagaaaagtaacaaaggaaccttgttctttgaaagttgtcataagtttcccaagcaataaaggtctcaaatagaattacatccttaaagccataatcataagcagctagatttgcatttgttggagcagagtagaactgagcagttgctgcaggctgaccacttttcctggggtgctgggagggcagctagccaacacagacatgctgaaggacagtgagggtgacagaggaagtgagctcaggtacaccttgctggactgctgagcacatatggaagtsacactgaacattcagaaattatttttatggaattccatgctttcatagactcttttctgttgttgtggtatttgataaaattccctaaaagcattttttagagggccagctattaaaatctttaacagggaaaaggttgcttttcatagttasagtttatatgtgcatggtttgtgcatacagacatttgtctctttttcttccgtgtcctctcctctcccgcagtgaagttattcgargtcattgaaactgaaaaaacactctacctaatcatggaatatgcaagtggaggtaagaacatttttatatatattgggttttttttctttctcccttttaaaaaaatacacaaccatactgcccatatgggtcatcattaaggtctcatttaacgtccagagccataatacgctaggatgagagtcggaaaagctgactcttagcacttctaggggttgccatgaagtgtttcactattagcattgttaattggtaatatctaaatacctggatattttttgtggtaaaacatgcatcactgaaaattatcgttaaaatcatttttaggcgcacagttcagtgacattagcatgttcacgttgccctcaccaccacccatgtccagaatgttttcattttctaacacgaaactctatacccattaaacactaactctccatttctccttctcccagtccttggcaaccattctcctttctgtctctatgaatttgactactcttggaacctcatacaagtggaattttacaggatttgtcttttttttttttttttttgagacggagtctcgctctgtcgcccaggctggagtgcagtggcgcgatctcggctcactgcaagctccgcctcccgggttcacgccattctcctgcctcagcctcccgagtagctgggactacaggcgcccgctactacgcccggctaattttttgtatttttagtagagacggggtttcaccgtgttagccaggatggtctcgatctcctgacctcgtgatccgcccgcctcggcctcccaaagtgctgggattacaggcgtgagccaccgcgcccggccaggatttgtctttttgtgtctggctgattgatgcagcatagtgtcctcaaggttcatccatgctgtagcatgtgtcagaatttcattcctttttaaggccgaataatactccattgtgtgtgtgggacacacacctcacattttgtttatcttgagtatgtggctatttaaacatatgaatgcttagtctgtttgaaacaaatgtgtgctttggtttagatgcttttctttaccagattttaatgtcgctggtgtctgtcttccccaaggccagaaatgatggttacagtacacatcactagagtttccttaaaataaagattaatgactagtaactatttgcctatggttttgtaaaaatgtagacattttctgaaatgcgtgtttatagctgctgtcttttataatgatttgtattttatggttgagattgggctgggtttgtagtttgcgaccacacgtgagtttcattgtctgtgaagggcagaagctttcttgttcatctttttgtgtcccctgcctctagcacactgcctggcacacagcagatactcaacagataagaattagactgcatttaggaattataaactactgggtacacattctgttaaactctatcgtaattttatcattagcactttgatccatgttacaaaacctgaagatagaaagttggattatagtctcatttgagtgagtttaccattgaaaataaaaagattgtaaacctgttgtggaaaacaatgagttgtagtaagcatacctttgacaccacttttttatactcctaattcattattagttgtgtattttatactttatatatgtctagtttgggaatttcattgggattttcaaaacttcaggggtagtagaaagaggggaaggttaatttcaggaccaaaaagctttatggagttctaatactttctgtgggcaaacaacacagagtaatgttcatagccctcacgttgtacagcctctacagtgtacaaggtgctttctcttaccagatctcctttgaccttcacagcgactccatgctgtggccaggcagtgagcgatgggctttttacccatgaggaaatggaggctgggaagtctcactgtgggcgctctgggcctggaccgccagtgctctgacagcagatagcctttctagtttgttggtcagtcacggctttctgttcccatctgttttagctacccaggtcacagagattactcatataggggcaagacaaaaacatctaagagtcatccaggtttagtagaaagaggatgggctctggaagagacagacatggagtgaatccagccagtggccctcattggccatgtgacctggcaagtaacatgtgctgagctgagcttcacggtgagcataggaaccccctctgagggctcagtgcacttggcaacattgtaagagcctttaatcatttaatccaaggtggtggttctgtattaccttgggtttttttttttttctttttggagacagggtctcactctgttgcccaggctcaagtgcagtggcgccatctcagctcactgcaacctctgcttcctgggttcaagcaattctcctgcctcagcttcctgagtagctgggactgcaggcgcacaccacacctggctaatttttctaatttttatagagacaaggttttgccacattggccaggctggtcttgaactcctgacctcaagtgatccacctgccttggcctcccaaattgctgggattataggtgtgagccacagcacctggcctctttaacagtgttttgttgagtttattaaaacaatttccrggacatatgttttattgttgatgtgtttgccattgtgaaaagttttattaaattggccacccattccaccattgcatctcccccacccgccagcctgctgccttttgatttggtaaactcatagaattttagaattgaaaataatcttagaaattttagggcagcggtctaatttttacagatgaaactgaagctcagaaagtttgttctatgccaaggggtccatagctagttagtttcaggacctgaactagaactaagggctttctgaactggcctgtcagtgtccttccatccagccacctgttcctgcccaggcaggagagccactctttgcttcttgyttcttttatctctaataaatagccttagtatttttcagttcagctgcttaacctgaatgttaatacatttttaataaggaaaaaagatctggattgaattcctggtttaaaagttgaactcctgaattataatttagtaattatgagtgtgacatatggttccacaaatctcttaagaggtttrtattgaattcaaatttagaaaaaaaaatctgtcaattatattgacagacttggattttatctgtgttactctacaacagctggtaggcttaatcgtttaatttttttaagtgaaaactctcctatatgatattcactcatgtttagttgtttttgcttattaaccacttgttttgacattgtgtgcttttctgcaaataggtcattcgcatagaaaatgctgacactttaccgagstgacatttaacttcataattcatcatagttaagtgaattgtgtcgtgtaaacttgacagtatgtaatgccttttaaaagatcattatgcaggctgggcacggtggctcacgcgtgtaatcccagcactttgggaggccaagacgggcagatcacttgaggccaggagttcgagaccagcctggccaacgtggtgaaacccccatctctactaaaaatacaaaaaytagccgggtgtggtgacgcacgcctgtaatcccagctactcaggaggctgaggcacgagarttgcttgaacgttggaggcagaggttgcagtgagccaagatcgggccactgcactacagcctgggcaacagcacaactctgtctcaaaaaaaaaaaaaaaaaagcattatgcaatcaagtaataacatgaaaatatttgtgcccattcattatgtaaaatttattctttcagagttagggttaataagagtttcaaagtcagataattgtgtaattcatgatgactttcaagtatcaaaatattttagtttaatattttcactaagctgatggaggtattccttatttgtatgaagtaaagatgtttcctsaaaacacttatatctaattttctaaattagtattcttttctattgatttcagaggtggtgattctttattctacattgataagcagttgacagtgctaatartatattccttgaagtgtcacctttcttcsctaaataattaatgttgtgtaaactgccacctaggcgtgcatcagctggttctgttgttttcacctccattgtatcctgagctcctacttctcaccaccactgtgcttcccactctagtccccgtcactttcatgattggtttgattattgtactgatctccctcttggtcttcctgtcccttcccgtcattggaagcctcttccccgctagcagccagtgatccttttaagaggtcagtcttttttcatctctgcttctcatctcacttgtagtagagccagagtcctcaccacggcctacaggactcttcctagcctcatgaactaccctcttcccctcattcacacttctccagccctgtggccttcttgctctttctcttaattactgtggaatcttaccccagataactacattgtccacaccctcaagtagtcagcaaaacacaagggtgtgcacacacaggctcacttgtctgtctctcctactttttctccacagcacttactgtcctctgatacactatatgtttattcatttattgccccctcccccaactagaatgtaaactctatgaggaaaaggaycttgtgttcactgctgcatctccccagaacctacctagaacagtgccttgcagttagtagacattcaggaaatatttgttgaatgaatgartatactcaggaaatgctttgttgtcataatcctgcagtgaggatgtcctcttctaacacaaataacttcatccattttaattttctgttttaattgcttagtttttattaaagcctattgaaaackctctttaaaataagagttatataatttaagtatagggaatttaattttaaggcttttcttcagcttaaagattttgttggtgaatttaaatgcctgtagttaaagccagcttagttcaaattccacatatttctggctaactttatatctatatttaaaaattagagcattgctaaaagtgaaacatcratttatrggaaaattaatactcagaagtaggatttctacttacttttatttctctcacctrtaggtgaagtatttgactatttggttgcacatggcaggatgaaggaaaaagaagcaagatctaaatttagacaggtatgaattaatgtgtctttactatgtcaatttgataatttatctcacttaaaccctgaagcaaacaagtgtttgcctccataaatgcttataaggcctgttggatggcaggggttggccattcaattcaacaaaaattgatgaagaacttttcatacctaaggcactgtgctggaggcagccatggttctattcctagctttgtaatgggagcattagtcttatacttaaccttccctttttacaactgagccttaaaaatctagagcctttcaaaaacacctgtgattacattaattaaagccatttcagagtttttagcaagcagaatgtcagaaccccaaaattcattattagctttgtctgacataaaccaaggccaagtgtaactgaaactgttaattagtaactttacttcttgctttgtttttactctgctttttaaagagactcgggttttaataagcaggttttaagcaaacaggttacttgactctcctgtctttattaataataattactgttatctattgaccatgccacacactgagataagtactttaccaacattaaggtaaatcttacagctgccttgtgagttaaggactgttatatccatttgctaaaaaataagacaactgagacatgggaagattaaataacttgcccagaattgcctttctttttttctttttcccccttattgtggagaacggggtctcgctgtattgcccaggcaggtcccagaattgcctttcaagtrggagacctgccatagactcagagtcccaaaccctctgaccccaaaactcagatttgcaatcattatattgtgctattatttagactgggaatcagcaaacttctgtaaagggccagatagtgaacattttaggctttgtgggccacactgtctctgtcgcaactatttmactctcttgttgtagcttagaagcagtcgtaggctgggtgcgatggctcatgcctgtaatcccagcactttgggaggctgaggtgggcggatcacctgagggtcaggagttcgagaccagcctggtcaacatggtgaaaaccctgtctctacaaaaacacaaaaattagccgggcatgatggcaggtgcctgtaatcccagctactggggaggctgaggcaggagaatcgcttgaacctgggaggcggaaattgtagtgagccaagaccgtaccattgcacttcagcctgggtgacagagactccatctcaaaaaaaaaaaaaaaaaaaaaaaaagaagcagctgtagacaataccaaatgaatgaacgtgactgtgttccaacaaaactttatttacaaaaacagggatgggccggatgtagccagaggccataatttgccaacccctgatttagacgaaggaaaggagcagtgcttcactgcttttaaattaattctgtattctcacaaggcctacattgaaatggaattatagcctcattttttcttagaacctttatattttgttttattcatatacagggttgtcaagctggacagactattaaagttcaagtctcctttgatttgcttagtctgatgtttacatttgtaagtgataggacttattaagtttcttataaacgttgcttatattttgctgttgcttaaatactaatggtactttgaattcaaatctagtaaaaccaaagtaaaaatcagctttggctatcatttaacttctctgatcctgtttttaaagctataaaaaaaaaagaaattattcttgatgaattccatagttctttgcaattctaatataatttgattgtatggtctattaaaggaaattcagatttttattagaaaaaaagtgtgtggctctttccataactgtactcttaatttttataaattggccacctaaaagggaacmtttttttgcttcatacaatttacattccttcctactcagatgaatctgacttgcaaacatgtgtgaagatggcttattgactatgaggaaggggctggtgtcacccagcaagagcttactaacctaaatcttgaggaaattactctaatttttattgtaaattccctgcagaaattctgaagcctttatttgaggagcctgttagttggactaggaaagatggtttgtatgtatgtgttttttcaattagcaaattgatttagagtgctttagaattgaccccttcttccatggtatttgcctaaaacagctccattagacttggaaggatacgcatgatattggtgtttccacttttctgtttcaaatgctgtggtttctttgttttttcgtttttgagatggagtctccctctgtcaccaaggctggagtgcagtggcccgatctcagctcactgcaacctccgcctcccaggttcaagcaattctcctgcctcagcctcccaagtagctgggattacaagtgtgcaccaccacgcccagctaattttttatttttttttttgtaattttagtagagacaaggtttcaccagtgttggccaggctggtctcagactcctgatctcaagtgatctgccctcctcagcctcccaaaatgctgggattacagatgtgagccatcgtaatgtggcctcaatttctgtgctttctaggagcttataagtcataattactttgactaagtaaaacaagtttttctatttatgacaaaaaggaaggtatgccacacacaaagtacactgtgtgtgatcccttttccatattcatcaccagatgggttttccccttctgcttccttcaccatgcccatcctagttactgcttatgacattttaattttttggttgagctcattcttttccaagaaaaagaatagatttccagctccatctttttttttttttttttttttttttttttttgagacaaatctcgctttgtcgcccaggctggagtgcagtggcgcgatctcggctcactgcaagctccgccccctgggttcacgccattcttctgcctcagcctcccaagtagctgggaatacagatgcctgccactacgcccggctaattttttgtatatttagtagagacaggatttcactgtgttagycaggatggtctcgatctcctgacytcgtgatccacccgcctcggcctcccaaagtgctgggattacaggcgtgagccacgcgcccggcacagctccatcttttttacttacctctttattggtgggctggtaatattgatgatttgacgctcttttatgtatgattgaaagtgaattaggttaaatcatagtttaacctaaataacatctgttagaaatcaccatttctacctggtaatagaatgcaaaaaaagcagtaagttcaagttgagtcttttcagcttattgtggcatcaggttagctttgagctgttttggagctaaagagagagagaaatcctttgatctctttgagaaagggcaggaaatcaaatctgcttcaaaagcagaatttgaaaataacctgtaagagaaatctcaatatgaggaaaaactaatataaattctgaatgagaaaaggaaaaagattagataaaatttacctgtgtcctaggtgacaaagctatgactttgttttgggaaaacaaagctattttacttttcaagttttcatgctgactgaatagaacaatagtgataaatccaaagtaacagatgctctaaaacccgttttttggcattggaatttttgtaccttttgttaattataagtgggtctgatattctgaatgttaattttaaataatgaagctgcttagtaaagtgctgatttttgttatcatctcatcctaaccccagttcaccttgtccttgctgcttattctgaaccaaaatattatacagccctctgagattttatgtccacgggtgggtccatggggcttagagctaagagttgatgatgatttggaggaaccaacagtaattttattataacctcagttttgtgtatatgtaatcatatgtgtctaaatatacatgcagaataccaaagaaaagactagatgcaagtacagcaaaatagcaagacatgttacctctgcttagtggtaatgcaggaatatatttctatagacttttctgtatttcctgaaatttctacaatgaccatataaagctttaatattagaagactttttttaagtgaccgtaagtgtgaaatttcagtaaaacaattgtttaatcataggcatgactgcaagttgactaaataaaagcatactatttactgaargtgggaggaatccttaatagtgcacgtagtagttttcatagttcacgtacgtcgcaacattcattcctccattttaataaaggaagaggaaactgaccctcagagaagttaactaacttttgctttccatgatccacatcagttagaaggaagactgttgcagggagcaggctgagaagggcacttacagaagagagccaacctggattaacacctgggtatgggcaactctctaaccgctggtttggtttggagttgactctatgggtatggaaaggttgcaccaggccgggcgcagtggctcacrcctgtaatcctagcactttgggaggctgagactggcggatcacctgaggtcaggagttcgagaccagcctggccaacgtggtgaaaccccatctctactaaaaatacgaaattggccgggcatggtggtgcacacttgtaatcccagctactcgggagactgaggcaggagaactgcttgaacctgggacggggaggttgcagtgagccaagatcatgccattgcactctagcctgggtgacagaacgagactctgttaaaaaaaaaaaaaaaaaagttgcaccagagccatcggagcctaggggcagccagggtcctccagatctaggcaatttgttgggtcctggcactacactgtaagtggaatgtcaacggatagggtccaaaaagagacttcagttaaaacagtagaaaacggaagaacgtcctcacctatttgtttttgccctcacccatgaatttctccagactggaaagttcaaggcataggaaaattgtttttagaaatccacacggacattcgagcgtatactgagtattcawtatgtgtgaacattaacaaagttattttcatcttaattacgaatctgcaccagtgatgactgactctgcrtctctcctattcagattgtgtctgcagttcaatactgccatcagaaacggatcgtacatcgagacctcaaggtgagtagaagtgcctcactyagtgtatgctctgtctgtttgtgtgcagttctctcagtggtcattacacaaatgaggtatagattagccttattagcattttttaaaatcccacaataattgaatcctcttaatcaagttatgggaaagagcattaaaaataaagaaaaataaaggttattgaaagtattttacatttcagttacrgtgactggtggttgatctctggagaacagtcatyacacagccaaacaaatgkgggcctccagaaatgtatggtcacgcccacagcatcctcagtgccacccggcattcatttctgctgctttcatcagtattctctcccgttaacagcagtgcctgtttgagacctctttcaaggtcctcagcctctgccctcactctggcataggatgaggtttcgtatcgcacagagaaaatagaaacaccatgcagaaactctcattttctaccaggccctcaaacctagcagcacctacccccatccatcacttctttcctcctgttacaggaaagtggggtgcttctgctctgagctctgggtcctgattccctctgggggctgtgctctgtctgatgcctcttttctctccgtttgtttattcactctccttctctactggcttttcaccagcagcatttacacatgctcaagtctatataccttttttttttttaactaaaaagccatgcctgttcctctttcagatacacgctttttctctcttccctttcatagccatatttctctaaacatttcctagattctgtgtcttaacttggcactcactttcactctccccttacgtaattgccattgacttgcttgttctctgcacccgcccctagagcattcacattcactctctcaactgcagtggccaactgtatgctgatggccccaaatccattcctacggccagagcactcttctgggatccaggacccagctgagcaaagggtgtcttcatataagcatcccttgggtgcagcaggttcaaatcctataaacatgaatgttcacttctcattcaggtgtctgatgtccctcaagtgccttactctcctstgctacccactcagtcaccaggtccttttgctgctgtgttccaagtatctcttaagctcactcttttatgtccctgttacactatccaaggccagaccaccattatctcataggtgattccgacactactttcttatatgttyttctctgtttctagtgcctcttcctcccatgtatgttttctacactgcaccsaaaatggtcttttaaggaaacacaaataagatggtcatttctctgcttgaacaactcttcattggcttcccattgctcttacgatgaaaacccaaacttctcaagtacaatcctttgtgattaagccctgaccatctccccagccccctctacacatctctatctcacatactgtctttcaatttcttgtgtgaaacatactgtgtctcacatgggttctcagactctttattctgcctgaaatacccctcatcaacacatccattatgatcagatgcaccttctggtgctttgatttcacttcatctgggaagccattcacacctttcagtgccaacccacaactccctgtgcctcttcagttatggcattttgtctcaggacagctgcttatcattctccttcttcccttctaaactgtgagctactgagggtagggctttatctgtcttgttcatcattatccatccagacactaatatagcatctgctgtggagtagccacataggaaatgtttcttaaagtgactgtgatttgtctcttttttttttttttttttttttttgagacggagtctcactttgttgccctggctagagtgcagtggtgcgatctctgctcactgcaacctccacctcgcaggttcaagcgattctcctgcctcagcctctcaagtagctgggattacaggcgcccaccaccatgcccagctaattttttgtatttttagtagagatggggcttcaccatgttggccagactggtctcgaactcctgacctcaggtgatccacccgcctcagcctcccaaagtgctgtgattacaggcgtgagccaccgcacccagccatgatttgactcttgaatgaggtttaggattctcccctcctcattaacagccgttttatagctatttagccgtttttatgaaatgcccctttttaaaaaaagttatttatgttttgagacagggttttactctgtcacccaggctggagtgcagtggcacagtcatagctcactgcagcctcaaactcccaggcttaagaggtcctcctacctcagccttccaagtagctgggattgcagatgtgtgccaccatacccagctaatttttaaaaatcttttgtagagaaagggtctcactatgttgcccaagctggtcttgaactcctgggctcaagtgagccactgtacctggccctgccccatattattcttgttttttggttttgagatggagtattgctctgtcgcccaggctggagtgcagtggcacgatcttggctcactgcaacctctgcctcccgagttcaagcaattctcctgcctcagcctcctgagtagctgggattacaggtgtgtaccaccacacccagctgatttttgtatttttagtaaagacagggtatcaccatgttggccaggctggtcttgaactcctggcctcagatgattcgtccacctcggcctcccaaagtgctgggatcataggtgtgagccaccgtgcccagcccccatattattattatyaattgaaaaactcaaggcttttcttgatcttgggacattgatgtttaaattagtgctagaattaatctgtacttcatgtttgttattgttaatattataaaataaggagttctgacttgtctcctgtttttttctctagaaagaatgttttcacattaattaggaggtaacttcatatcattacagaaagcttttctaaaatgcctaatcctgtcataattctaattctattttggctaaatttcatttttgtcttgrtgttttccctctaggctgaaaatctattgttagatgccgatatgaacattaaaatagcagatttcggttttagcaatgaatttactgttggcggtaaactcgacacgttttgtggcagtcctccatacgcagcacctgagctcttccagggcaagaaatatgacgggccagaagtggatgtgtggagtctgggggtcattttatacacactagtcagtggctcacttccctttgatgggcaaaacctaaaggtataagaagctgcacccatgtacttcactaaactaaaagaagtttcctaatattacatggcttaatatttttaacattatatcagtgcggggggtttcagggggttttttgttgtgttttgttaactaaacctaaaggttgacttactcgttttctttcctctgtacctctccaaaggaactgagagagagagtattaagagggaaatacagaattcccttctacatgtctacagactgtgaaaaccttctcaaacgtttcctggtgctaaatccaattaaacgcggcactctagaggtaatcatgtaggtggaaacaagcagtaactttggagagtctttagagtgaccttagatctttgcttgatttgtatgccatactggatatatcctgcggctttttaagcaagaattgaaacattaaaaaatattttttgagtttatgctttgaacgatagtcaatgaaatgttgaaaataaatttttgtaaatattacggttatcagaatatttcattttactctgctaatgaacagtttaccttttttagcaaatcatgaaggacaggtggatcaatgcagggcatgaagaagatgaactcaaaccatttgttgaaccagagctagacatctcagaccaaaaaagaataggtaatcactccatgcctgcatgttcatgtgtttttgtctaagtaacatatttctgttttgactcatgtctgtgcctaaaatgtgaataatggaaagttaagcacaagtyatatgaacagtttatctgttctgtcatatttaggaacgtaactacctgcagtttcctataatggcacccagtaactctgaaacaagtgcccatttatgttacaaaatatatgtaatatgtcatcttttaggtcaaatgaaaattattttaccctacaaaagaatgatttctggccgggcgtggtggctcacgcctgtaatcccagcactttgggaggccaaggcgggcagatcacctgaggtcgggaggtcgaggccagcctgaccaacatggagaaaccccatctctactaaaactacaaaattagccaggcacggtggctcatgcctgtaatcccagctactcgggaggctgaggcaggagaattgcttgaatctgggaggtggaggttgcggtgagccaagatcgcgccattgcactccagcctgggcaacaagagtgaaactccgtctcaaaaaaaaaaaaaaaaaaaggatgatttcttacccaaacaaaacacataaactgtattatgcccttcttttagatattatggtgggaatgggatattcacaagaagaaattcaagaatctcttagtaagatgaaatacgatgaaatcacagctacatatttgttattggggagaaaatcttcagaggtaagagtaatcagaaagagctgaaatrccctgtatgtaattattagtttatataaactgttttcttagtttttatcttttgaatatttgtaacatttgatacatcattttttagatttacttgcaaatagcaaatctaaatcctatgactattataagctattttaacttaacccttaatgatggatattggccaggcgtggtggctcatgcctgtaatcccagcactttgggaggccaaggcggacagatcacttgagaccaggagttcgagaccagactggccaacatagggaaactctgtctctgctaaaacaaacaaacaaacaaaaaattagctgggcgtgttggcgcttgcctgtaatccctgctccttgggaggctgaggcaagagaactgcttgaccctgagaggcagaggttgcggtgagccaggatcacgccactgcactccagcctgggtgacagagcgagactctgtctcaaaaaaaaaaaaaaaaaaaaaaaagatggatgttgtcataaacctggtctttcataaattaacctgtagtcattaatagcttagaaatgacgtaaagcatcagatgaagtaaatacaacatttaaagttatttgagaaagcctggaaagaaaatcataaataccttacctttagtgtctttccagccgtcagaaaactacttttgcttgagtttagggttgtcatttttgtacgttgtgattcctcctctctctgaatgaacggtttatgagaggtctgtgttaatgaaaagtttaacttcctaataagccatttgggttcgtgttgtggtttgctctgtttttctcattttctcttagctggatgctagtgattccagttctagcagcaatctttcacttgctaaggttaggccgagcagtgatctcaacaacagtactggccagtctcctcaccacaaagtgcagagaagtgtttcttcaagccaaaagcaaagacgctacagtgaccatggtaagttttggagtatcccagtgccttctcttagagtccaggcaagaggtctcctagcactgggaagcattctcttgctcagagcctggcttgatgtcctttcttggcattgctttctttctttcttcttttttttttttttttttttttttttttgagacagagtctcactctgttgcccaggctggagtggagtggcacgattttggctcactgcaacctccacctcccaggttcaagcgattctcctgcctcagcctcctgaatagctgggactacaggtgtgtaccaccatgcctggctaagttttgtatttttagtagagacggggtttcaccacatttggccaggctggtcttcagctcctggccttaagtgatccacctgccttggcctcccagagcgctggaattacaggcatgagccaccgtgcctggccagcattttttcttagtgttcctgcaggtgctgccatgattacatattacttcaaggctcttatcttctttatacatgcagtagatttttgctggataaagcttagttgagtggaaaccttaccatttgcccttctagaacctctgctttaatctgtagttttcctttttttttttttttttaaatggagatgggggtctcgctatgttgcccaagctggtctcaaactcccaagttcaaactrttctctcaccacagcsttctaaagtgctaggattacagacgtgagccaccatgcccagcgctagaactgggcgctgtaccgaactgaatagaactgctagtctgtagttctattcactctcttcacctctgcattggatttactttgtagagtagcactgtccagtagaactttctgagatgattacagttttgtgtatctgtgctgtccagtcaagaagctactggccacttgtggctatcaagtacttgaactgaggaaatgatttttaccttttttatttctatttattttttattatttttatttatttatttatttatttatttttcagatggaatctggctctgtcgcccaggctggaatgcagtggcatgatcttggctcactgcaacctccacctcccaggtcccagcagttctcctgcctcagcctcctgagtagctgggattacaggcatgcacaaccayacccggctaatttttgtatttttaatagagacagggtttcaccatattggctaggctggtcttgaacttgggagctcaagcaatccactcaccttggcctccaaaagtgatgggattacaggtgtgagccaccgcgcctggccttatttatttgtttattttttgagatggaattttgctcttgttacccaggctggagtgcaatggcatgatctcggctcactgcaacctcagcctccgaagtagctgggactataggcacacaccaccacacctggccaatattgtatttttagtagagacgggatttcaccatgttggccaggctggtctagaactcctgacctcaggtgatccacccaccttggcctcccaaagtgctggattacacgtgtgagtctgtaattggcctggctgatttttacccttttaaaattttcctggccggacatggtggctcatgcctgtaattccagcaccttgggaggccgaggcgtgtggatcactaggtcaggagttcgagactagcctgaccaacgtggtgaaaccccatctctactaaaaataaaaaaattacctgggcatggtggtgtgtgcctgtaattccagctactcaggaggctgaggtaggagaatcgcttgaacctgggaggcagaggttgcagtgagccaagatcgtgtgactgcactccagcctagtgacagagtgagagtccatctcaaaaaaaaaaaaaaaaatttgtacttaagtgtaatatatagccagttgtggccagtaactctcataatagacaggacagccctggagaatatatggaacctcagttttgccttaattggtttaaatgttgtactgtgtcattctcatccatactcttgctgttagtgtggttaagccactctcccttttaaacttcacctagaagccagtcctttatgagacataagactcccagtgggtaggcttaccaggctctacagttgctctgccttcaaggcagcctgtgtgtcagagtcctgaggctagcgtgtgtgtttacttgcccataactataaatgttaacattgcagatatttcctttaattctactattccaggattcaggaactaaatctatttttttttttttttttgagatggagtttcactcttgtcacccaggctggagtgcaatagcgcgatctcggctcactgcaacctccgcctcctgggttctagcaattctcctgcctcagcctcccgagtagctgggactacaggcatgcatcaccatgcccagctaatttttttatttttagtagagacggggtttcaccacatttggccaggctggtcccgaactcctgaactcaggtgatccatccacctcagcctcccaaagtgctcggattacaggcatgagtcactgcrctcggcctcattttatttctcttctctggacattttccatcttaatactttcatcttgagatttgacacttaggactgcacagggcattttaggtgtggacagctttgattttgtactaaaaatgattacacttggcttgatttccatttctcttccttctgttgcttgcctttctacatggtttagactgaagcaacagtgtactaatatcactagtaaaccatctacagtgcctgctattctagggtgtaactgagagctcagaactcattctcacatcaggatttgtgctcctagcatttgtaggtgacgtgttgatctaggtctgccttttttgtgttcatgttagtcactaacaaggggggtttctagtgcttatggaccacatggcaattaaatgcccatatattgccctgaaaccatctggtttaacttgtccctcaatcctagaagaaacctgacaatgggattttcacatttctctaaggaatatgttagtaagttattccttaagcacatagattccatccagattattagtgcctttttccccccagctcaattttagagataaaaagagctttagacatggtattgtacactcaccaaacctctgttttatccctaaatagaccaagagagattaccaagtctcccaaggttacatagtaaatgagaaacacctggggcagagctcaggcctgctggtccaagccctgtgttttttctccactgaagcacctcattggagtagctttttcataatcctcatctttcttggaatttctgaaggcaggcaagcctgtatagccgggctaactttcacctcatcctcctgcctcgtctcacctctcccttcccttttccttgcctgtggatgctgacctctgcatgggtgcctgcttctctaaagctacgatgtaatctgtagctgtccttcctcgtttgagacccacatgtgaacaccccatatgtgtgcactttttctgcgaatggtgatcatctgattttcaaggggttctttagcttgttttttaaaaaatgaaaaaaaaaatcactgtttactaatcaatgagtggtattggggcaatttggtagttctcagaaaaaaaattaatttggatcaatttctcacatcttatacaaggatgaattctaattggagttaagatacaaatatagggctgggcgcagtggctcatgcctgtaatcccagcactttgggagtccgaggcaggtggatcacgaggtcaggagatcgagaccatcctggctaacatggtgaaaccctgtctctactaaaaaatagaaaaaattagccaggcgtggtggtgggcacctatagtcccagctactcaggaggctgaggcaggagaatggatgaacccgggaggcggagcttgcagtgagccgagatcgagccactgcactccagcctgggcgacagagcgagactccgtctcaaaaaaaaaaaaaaaaaagatgtaaataaaactccagaaatattgaaagaaaccttgggattatttgctttgtaacttggactggtgaaggtgtttctgtcaccccaaacaccaaacccatgaaataaaagacttacaaatttgattacataaaaatgaaatttctggccggtcgcataatcccagcactttgggaggccgaggtgggcggatcacgaggtcaggagatcgagaacatcctggctaacacggtgaaaccctgtgtctactaaaaatacaaaaacaaaatcagctgagcttggtgtcaagtgcctgtagtcctagctgctcaggaggctgaggcaggagaatggcgtgaacccgggaggtggagcttgcagtgagccaagatcatgccactgcactccagcctgggccaacagagcgaggctccatctcaaaaaaaaaaaaaaaaaaatgaaatttctgtgtgacacatccataccatggactactactcacaataaaaaggaacaggctgggcgcggtggctcacgcctgtaatcccaacactttgagaggccgaggcaggcagatcacgaggtcaagagatcgagaccatctggccaacatggtgaaaccccgtctctactaaaattacaaaaaattagccgggcatggtggcaggcgcctgtagtcccagctacttgtgaggctgaggcaggagaatcgcttgaacctgggaggtrgaggttgcagtgagccaagattgagccactgcactccacagcctggccacagagcgagactccgtctcgaaaaaaaaaaaaaggaacaaactatgatgtgcacaactcagatggatctcaagggaattatactgcgtgaaagtacacaaaaggttacattccatggatgcccattcatataacattcttgaaatgacagaattctagagatggcgagcaggttagcggttgcaggggtttagcaaaagggagagtaagagggaagtggctgtggctatgaaagggtagtctacagggtctttgagatggaaatgttctgaatcttgactgatggtgaccacatgaatctgaacatgtaataaaagagtatagaatgagatacacaaacatacaaattagtgcargtaaaactggggaaatctgaacgaggtcagtggattagatcaaggtctgtttctcttcagaatctcaaatcttaaaaggttttgtattttctaaacacaaataaaagctggaaagccaatcagtagtaatctgaaagttcacaatgtcagtwgacgtctcatggtattgggaagaaagataagcattgaggctaatatcaccctatgcttgattaagtttttgttttatatgttaaaatcactaaaccgaaagcttagttgttgttctcccacaaataaaattaagccctcatttacttttaattcagttccaaataggtttgccatttagatttttgtccaagaactaactcctccccactcccggtttttgtttgtttgttttttaaatttatttattgagacaggttctcactctgtcacccaagccacatgtagcctcaaactcttgagctgaagccatcctcccacctcagtctcccaaagtgttggaattacaagcatgaactaccacacacctcccacctttaatatatctaaaatataaattctcttctgccttagaaaaaacaggctgggcgcagtagctcatgcctgtaatcacagcactttgggaggccaaggtgggtggatcacgaggtcaggagatcgagaccatcctggctaacactgtgaaaccccgtctctactaaaaaaaaaaaaaaaaatacaaaaaaaaaaaattagttggcatgcgcctgtagtttcagctactccggaggctgaggcgggagaatcccttgaacccagtaggcagtggttacagtgagccgcgattgcgccactgcactccagcctgggcgagagagctagactccgtctcgaaaaagaaaaaacaagcatttgactctgtcttttaagattaccactggattatcatatctgaggcatatactagttatcatgttcatttccaagattctttgccctctgaatctcctgtgctgctattggagtctctatatggtttactacaggacattagtctgtcatccacatgtccctaggcacatgtccctggacacactcctcctggagtggcaggaatgactagtgacctccaccgacttcctccctgtcgcttgcatgattcctctgcttctacaccttcccctgtctactcaactacaccttcccctgtctactcaaactccggtttatctagaagattatgagtgcttttaaaaagatccaagataaaacttcaaaagaagtggcccataaaatctatacttttctcttccaaaaggtgatggcatctctcctacaaaagaggatgtaattcactcagatgtacaagatgaactggttcattctgcttgttacgtatgcatctaattagtttgaatctatgcagtaccaccaccttaagatgtttccaaaggacaactctaaactcttactattaaaaaaaaaatgttttaagtagaaaggagtattaagtgaaatttcaatattgaattcattgcataaggcaaacattagatataagtgggaaacatcttagaggattttactgttttacattttttaggtgaatagcaaccttagatcatcttacaaaatatggttactgtcacaaaataaaacttgaaactatattcagtcatttaaaaaatgaactctttattttagctggaccagctattccttctgttgtggcgtatccgaaaaggagtcagacmagcactgcagatrgtgacctcaaagaagatggaatttcctcccggaaatcaastggcagtgctgttggaggaaagggaattgctccagccagtcccatgcttgggaatgcaagtaatcctaataaggcggatattcctgaacgcaagaaaagctccactgtccctagtgtaagtgttgttgaactatagagtggtcttagggtggtagggttggaaccagctagacaccaggtgttcattttactcctgtggtctctcgtactggaatgccctctctactaggcagccatgcccaatcttaacttacagaaatcctacctgctgcattgtaggtatttattgttgacactctcttagttcattcttgctgctgtaacaaaatacctgagactggctaatttataaagaaaagacatttatttcttacaattctggaggctgagaagtccaagatgaaggcaccaacaagttccgtgtctggcaagggccctgttctctgcttccaacatgatgccttggtgctggcatcctccagaggagacaaatgctgtgttgtcatgtggctgaagggacagaaggggtgaactcaccccctcaagcccttctataaaacactaatctggccgggtgcggtggctcacgcctgtaatctcagcactttgggaggccgaggtgggtagatcacgaggtcaggagttcaagaccagcctggccaagatggtgaaacgccatctctactaaaaatacaaaaattagctgggcgtggtggcaggcacctgtaatcccagctgctcaggaggctgaggtagagaattgcttgaactcaggaggcagaggttacagtgagccgagatcgcatcactgcactctagcctggcgacagagcgagactccttctcaaaaaaaaaaaaaaagatactaatcccttcatgaaggcggagccctcgtggcctaaacacctaaaagactcatctccaaatactgttttctcctatgggagataaagcttaaacatgagttttggaggggacacattcagagcatagcacacccaccatagacactagatggtgataggtcctttatttcaaggcctggttccagttatttcggacacctgctgagccttaggttgtcaggtgctgagacatggaaagacctcacagtctaacaggaagtgaatgaaaacagtgacagtgcagacggaagcctacgtgcacacacggggaggtctgactgccagtgccccaaagatgtggtgttcacactgagtcttcaaagagctctartgatgaagagtgttggctgagttcttaccatgtgccaaggaccatgctcagtgctttttcatggattagctacattttaaggtgaaaaaaaarttgggtaattgcctaaaattacactgccaacctgaatccagctcttaatccctatctgtaacaaaatctccccagtaagtagataatatttactaaattarattgaatccattcagcttcagaaacttttttctgtgtattgaagtatgttctatctaacctaacatattaaagaatttgcagagaagtaaacaatcttaagattattctgtaagcacgtttttccctrcaaaattaacaatgatgcagccctgcctccaactccagaaaaaccctggactgaggaggctgtggagaaaccctgttgctctctgaaagcccttcattgttccattctggggactgggtgcatgaaggaccccaaggggctttgcatgtttcatcctctgaccttatgcttagtcgaagtaaaccctgtgtgaaaagtttattttggcctccaaatgccatacagtaggattattgtttccatactcctgcagttaaaattccgtctccaacgtttgttgacagttaccagagaagatgagggcattattccctgccttcatgacttctcttcccctttgctcttgtctacacacgctgcccttctgaaagtgaatcatgagtattttcagtccacccatactaaattacttacaaaggaaaaaaggtagttagcaacattattattttctcccatgagtctttgggatttctctgtagatggtctgctcaagctgtagtaaaagtgactgctctatctttgtttaaaaattatctgataaaattccatagctatggccaggcacggtggctcacacccgtaatccctgcactgtgggaggccaaagtgggcggatcacttgaggtcaggagttcaagaacagcctggccaacatggtgaaatcccatctctactaaaaatacaaaaattagccgggtatagtggcgtgctcctgtaatcctagctattcgggaggctgaggcaggagaattgctttaaccgagaagatggaggttgcagtgagctgagattgtgtcattgcactccagcctgggtaacagagcgagactccatctcaaaaaataaaaaaaaaagtccatagctgtgacttgttccttgctttttagttttttgttttggaagttaaattcatgtgaatccacatgacaatgattaaccattttaaagtgggcaatgcggtggcatttggtacactcacagtattgtgcagccaacacctgtctttagtttcagaactttttcagctccccagaaggagcatctgtttaggctgggcacagtggctaacccctataatctcagcgctttgggaggctgaggtgggaggatcacttgagcccaagagtctgagatcagcctgggcaccagagtgagacctcatctctacaaaaaaaattaaaaagaaaatagctgagcgtgatgatgcacacctgtagtaccagctacttgagagcttgagaggctcaggtgggaagatcatttcagcccaagaggttgaggctgcagtgagtcatggtcacatcaccatattccagcctgggcaacagagcaagaccctgtccttaaaaaaaaaaaaaaaagtggccgggcgcagtggctcacgcctgtaatcccagcactttgggaggctgaagtgggcagatcacaaggtcaggcgttcaagaccagcctggccatcatggtgaaaccccatctctactaaaaatacaaaaattagccaggcatggtggcgggcacctgtaatcccagctactcgggaggctaaggcaggagaatcgattgaacccaggacgcagaagttgcagtgagccgagatggtgccactgcactccagcctgggcgaaaaagcgaggctccatctcaaaaaaaaaaaaaaaaagaacacctgtatcccttaagtaatcactttccattcctcctctcccctctgcccccctcccttccccctcattccctggcaaccaccagtctgtgttctgtctctggatttgcctgttctgaatattttatataaatggaaccatttcacatgtatccttttgtgtctacttctttctttgactcagcataatgttttcatggttcatccaatttgtagcatgtattttcttttccctttttttttttttgagatggcatttcgctcctgttgcccagagtgcaatggcacgatcttggctcactgcaaactccacctcccgggttcaagcgattctcctgcctcagcctcctgagtagctgggattacaggcgtgcgccaccatgcctggataattttgtatttttagtagagacggggtttctccatgttggtcagtctggtctcgaactcccgacctcaggtgatccacccgcctcggcctcccaaagcgctgggattacaggcgtgagccactgtgcccagcctgcagcatgtattagtactttgtttcttttgggggtaatattccattctgtatatatactacaatttaactgttcatctgttgatggacatttatattatttccatgtattggttaaaatgaataatgctactataaacaattgtgtacaaatttctatgtggacttaaatgttttaatttctttccttctttcttggggaggagacggtctcactctgtcacctaggctaaagtacaatggtgcaaacacggctcattgcaacttcgacctcccagacccaagtgatcctcccacctcagcctcccaaatagctgataccacaggcatgcatcaccatgcctggcttattttttctgtttgtttgttgtggtagagatgaggtctccctatgtagcccagccaggctggtctcaaactcctaggctcaagcagacatcctgcctcagcctcccaaagtgctgggattataggtgttagcctctgcacctggctgtgttttcatttttcctgggtatatatttaggaataaaattgttgagtaatatggtaactccatgtttaattttttgagaaactgccaaactgttttcctcacaactgtaccattttatccagcaatagtgagagtccctgttttcttcacattctttctaacaattaataattattttattatttaaagctttcctagcaggtatgaagtagtacctcatgcttttgatttgcatttctttaatgaccaatgatattgggcatcttttcatgtgtttcttggccatacgtatagctttttttttttttttttttttgagactgagttttgctcttgttacacaggctggagtgcaatggtgcgatctcagctcaccgcaacctctacctcccaggtttaagtgattctcctacctcagcctcctggcctcctgagtagctgggattacaggcatgcaccaccacagccagctaattttgtatttttagcagagacgggttttctccatgttggtcaggctggtctcgaactcctcacctcaggagatccgcccacctctgcctcccaaagtattgggattacaggtgtgagctaccgcgcccagccgttgtatagcttttttaaagaaatayctattgaaggtgccgattttaaaattaggttgtcaggccgggcacctcaggaggctgaggcaggagaatcgcttgaacccaggagggggaggttgcagtgagccgagatcgcaccgctgcattccagcatggcgacagagcaacactscatctcaaaaaagaaaaaaaaaattagccaaatgtggtggcacatgcctgtattcccagctacttgggaggctgtggtgggaggattgcttgatcctgggaggcagagccaagattgctccactgcactccagcctgggtgacagagtaagaccttgcctcaaaaaacaagtaaataaaagactggcattcctatttatgtagataagttcattttttctcattgtactgtatttaccaaataaatttaagacaaaaatgcccttttttatagagtaacacagcatctggtggaatgacacgacgaaatacttatgtttgcagtgagagaactacagmtgatagacactcagtgattcagaatggcaaagaaaacaggtaggagattctacctgtttgtaagaaaagttgtttttcccaagagaaatggaagcatgttatttactgctttgttcttataatcattttcaaattaaaactgtaagtattctctgaaggtaagttaaatttgtatactaatttttagcaagatactagaattctaaattctttttgttgtccagagcatcatcctcctgcctggctgtgtatgatgattaaaaggcttgagttaaacccagggggtttcctagaggaagtagatagtaagctgtggttatgttgtagaacagtgaataaggaaatggagattgtcttgtgctcattaataacttgaacaaaagccgaaagtgggggaagataaggacgtgaggcagagagtcatacctcaggagaatgtacagcaccaggtagcattaaaggtccgcagtttaccaaagggtccagatggctgagtctaartagaaacactggagaagccaagagaagtggaaagtccagccttctgaatgcttttaatttggctacatagcaagcatacataggatgagcgtgactttaaaaagacaatgatgttacatgtcaataaggagagcatcctatcatgcacatgattttcttggggttttgaaataaaataagtagagtcagtaaaatgggattggataggtgtagagactctgaggtggggttagtctgggtggagagaaaagagaagttagattggtagagaatagctaaatatgctatattctgttcagaacaaatttcccaggctggcatggattttccttctttgtttttggaagagcagtaagtgtacatcattcttttaacttgaacattgtttgcatcagaattgttctgacatttactttctgcagttacggtgtgaggttctgtttcttaatcctaacctatgtttgatctcattagtcaaacaaaatgtttgatcactacattttgtgacagcctaatcaaaaattctctcctccttcatccttagttccaaactgcttatcacttccctgttccataggccacttaggwwwgagttgayatgaggagtaacatttgktctgtaagattatggttattattcgttgaatttttagcaatatttacattctcttgttctcttttatgactcgtgtgtgtgtgtgtgtgtttcaacattgtcttttcttatgattaaaaactactaagaacttgagtatagcagctggggtagatagtttacagataatgattgatataggtatttctttttttttttttttttttttttttttgagacagagtctcactctgtcacccaggctggagtgcagtggcctgatctcggctcactgcaagctccgcctcccgggttcacgccattctcctgcctcagcctcccgagtagctgggactacaggcgcctgccaccactcccaggtaattttttgtatttttagtagagacggggtttcaccatgttagccaggatggtctcgatctcctgaccttgtgatccacccacctcggcctcccaaagtgctgggattacaggcgtgagccaccgtacccagccaggtatttcttaatagtagtctactctctggtagatttgtattatagttcagttcttaactttcaaatttcttctagttcaaaagtgacttaatagaaaatatcaatagaagacttaattagaagtttctggtgttacagattgtagtctacaggactacagaaatgtttcatggtcaggcacagtggctcacacctgtaatcccagcactctgggaggccaargcaggtggatcacttgaggtcaggagttcgwgaccagcctggccaacatggtgaaaccccgtctctactaaaaatacgaaaattaaccatgtgtggtggcacgcgcctgtagtcccagctaccagggagactgaggcaggagaattacttgaacccaggaggcagagtttgcagtgagctgagatcgcgccactgcagtccagcctggacaacagagcaagactcatctaaaaaaaaaaaaagttgtttcattacctttactacttctaaattctgaaaatgcactacccagctccttctgaactttaggatatgtgactgtctgaggtgcagagtcagtctcctcaagggtgttaagactaagatctgctctctgcttccatcctgtgctacacgtatcatacaccaggcacatgcatatatgcctgtgtcttctgattctcttttcctaaaatttttcgtttcactctttggaaataatatttaagacttctttaatttctttggcaatatttcctttctgcattccccctggagacacctgccttgttggggccaactctttcatatcctgacctgtctcgttgcttctcttagcatcagtcattgaaatactttgcttctgaaggtgtcgtctttctctttagtcaaagagagtctcaccgccaaaccttaaaagacagggcccattgttttaataatatttggactttcctttcctatcttataaatgaattaaaagactggaaaaytattgggtttaacttctttagttaaggcactaaatgtgacagctttcccttaaaattgatgcttgagtcttcagtgagatacaattagctttccctgcacagatgacttcttcggcaaattgttccttttccctctcttcacccacccatatatcttatttcttcactaatttaaaatatgagtgagctgtaggatgcctggacctakgttaacttctgaaacaaacatgttaagttccaattttagccttaaatattttcgacatttagccttaaatgttttcttctttatatgagtgttcatacggaatttcaacatgagaataatgatggctgattttttaaaaactgtgtgaaggtttaaaccagagactccacatatcttaagcccttactaccttcaaaatcctactgtaaacaggatattttaaaggcttactaaatgcaaggctttttctcgtcataggcaatataattaattttaattattttttcttttgaaaattagttttattaattggttcttactaggccaatctttgttttatcagctttcctgtgggaacaataaagttaatgacacagggagcataggttagggccagttgttactttggcacaaacacctgtgattcgttttcygagactagttttaaactggtcgtgctgaaggccagcccactttctgctgtaattattctgccttctgatgttattctcgaaaaatggccagattccaggcgtgamtaatggttggtgtaaaytaggcatgagaaggtttgattacaccttcaattgtatgattctatcatgatggtataggtttgcagtgagtcttaaaccacatagcactgacacgtagtgagtgctcaaacaaatgttagctttcattattaattatagactgttcagacaaggttatgcagaattttcttagtttgcactgactaaacctaatctttcaagttaataatgttgctaaaccacctrcatagcagagacactctgctcctacgatttcatatgctttagatacccggacgacactgtttagactacttcatttaaagaccccagagaagtgacgtgctggtgttacagtaatgcaaacagaatcttttctttttttttttttctttttttctttttttttctgcgatggagtctcgctcttttacccaggctagagtgcaatggcacgatctcgggtcactgcaacctccatctcccgggttcatgcagttcttctgcctcagcctcccagtagctgggattacaggcacacaccaccacacctggctgatttttgtatttttaatagaaatggggtttcactaggccaggctggtctcaaattcctgacttcaagtgatccacctgccttggcctcccaaagtgctgtgattacaggcatgagccactgcaccaggcccagaatctttcaaataaattttagatattggatattactgtaaagtttcaaaattgtgaagtggcttattattttatccactttaccctgcatcaagtcacatagagattgagcagagaaggattgaggacacttagcgtatgtatctttggactacatataaaagttgctttttttaggctgggcgcggtggctcccacctgtaatcccagcattttaggaggctgaggcaggtggatcatgaggtcaggagatcaagaccatcctgaccaacatggtgaaaccctgtctaaaawttagctgggcgtggtggcatgcgcctgtagtcccagctacttgggaagctgaggcaggagaatcacttgaacccaggaggcagaggttgcagtgagccgagatagcgccactgcactccagcctggcaacagagcaagactctgtctcaaaaacaaaaaaaaagggctgagcacagtggcttacgcctgtaatcccagcactttgcgaagctgaggtgggcggatcacctgaggtcaggagtttgagaccagcctgaccaacatggagaaaccccatctctactaaaaatacaaaaaaaaaaaaaaaaaattagccaggcatggtggcgcatgcctataatcccagctacttgggaggccgaggcaggagaatcgcttgaacccaggaggcagaggttgcggtgagccaagattgcaccattgcactccagcctgggcaacaagagcaaaactccatctcaaagaaaaaaaaaaaaggctgcttttttttttttttttttttttttaagatggatggagtcttgcagtgtggcccaggctgcagtacagtggctagtcacagacatgatcatagtgtactgtagccttgaactcctgggctcaaatgatcctcctgtgttggcttcttgagtagctgggactacaggcatggaccaccacacctggctaattttttattttttgtagagatgaagtcttcccatgttacccaggctggtctcaaattcctggcctcaagggatcctccagtctcagccttccaaaacactaggtttacaggcatgagccaccatgcctgtccttggactatatttttaattctgcttttgcccagtcacttgagtatgcttttaatcagcagccaatacatttcttatcagaatgttctgataggggctagaggtcatagcaacaaattcaaagtgcctatcctttagtaaccttaagtggattaatgttttagaaaagatagtcaagactgggcacagtggctcacaagccctgtcatcccagcacttcgggaggcctagacaggaagatcacttgaggccaagagttcaaggtcagcctggacaaagtagcctgagacccccgtctctataaaaatatatatattttttaattttaaaagatagtcatgaatacaaaacagttgggaagattaataggaactctcttcatgcaacttgaattttaagaaaaacattgctatttctatcaattaaggtttaaatgtagaccaggcatgatggctcacgccaccatgtaatcccagcactttgggaggccatgacaggaggattgcttgaacccaggagttcaagaccagcctgggcaacatggtmaaattccatctctaccaaaaatacaaaaaaattagctgggtgccaggcacagtgcctcacacctataatcccagcactttgggaggccgaggcaagtgsatcacctggggtcgggagttcaagaccagcctggccaacatggtgaaaccccatctctactaaaaatayaaaaattagctaggtgtggtggtacatgccggtastcccagctatttgggaggctgaggcaggaggatggtttgagcctgggagatggaggttgtagtgagccgagatcacaccattgtattccagcctggacggtagagccagacccagtctcaaaaaaataaaaataaaaaaattaatgtaatacagctactatgaacccacaaaaactttaaaaaaattttttaattattaaaaaaatgtaatgctgctactgttttgcttwtgtagattgtgggctagaataggaaataaaactatcatttttaacacttttctggggggaaatattattcgaatttcataacaattagcttgatgaccttttagaatatatatgtagaccattgtgatgttggggctgcctgttgtaaataggatttttgtgagcttgattgtacaaaattgaaatttgcaaacatcttactgagtttactgtttccttctgggtgttaggcctactgtagaaatcagaaaaatcggaaatattttgytgcttgctttgtgaaactcatgatgtgacatggattaaatttctaaaaagtttatttaattgcctttaaaattagtatgtcaaaaagtttatttatttatttatttatttatttattttaatttgaaacagtctctctctgtcacccagactggagtttagtggcatgatctcagctcactgcagctaccacccccgggtttaaacgattcttatacctcagcctcctgagtagctaggattacaggggcccgccaccacacccaactaatttttgtatttttagtagagatgggtttttgccatgttggccaggctggtctggaactcctggcctcaagcaatccacccgcctcagcctcccaaagtgctgggattacaggcgtgggccaccacgcccagcctcaagttaataatttataatcccagcactttgggaggccaagacgggcggattgcctaagctcaggagttccagaccagcctgggccatgacgaaaccctatctctacaaaatttttttttttaatttataatgagaaaataaatttacatttccttcttaggtctctagaggatccattttttttctgcaaagcatctgtccacaccctcttaccatgcttgtatgccttaaagatctagcttggcctgtcagcagtgtgcttcattgggaatcgatgcagcaccctcctgcctgcaagctgactaaaagccttttccttctccaaagactttgggaccatttgtattcaccagggaaagggtcaaacaactcctgcatcttcttcccctgcttttcttggcacatctactgatactagctcctaatttgggcaagaaaaaagtcaacaactggaggtagagtgtgttgaccctggactcaccctgaaaggtaagggcacaagagatagttgtatttagctgtatcttgttagaaaaatacatttgtgtagccaggcgcggtggctcacacctgtaatcccagcactttgggaggctgagccgggtggatcacgaggtcaggagttcaagaccaccctggctaacatggtgaaatcccgtctctacgaaaaatacaaaaaattagccgggcgtggtggtgggtgcctgtagtcccagctacttgggagactgaggcaggagaatggcgtgaacccaggaggcrgagcttgcagtgagcagagatcacactgcactccagcctgggcgacagagtgagactccgtctcaaaaaaaaaaaaataaataacacttgtgtgcattcatgtgtacgtgtgtctgtacacatgtacaagaaacaaccgagcatttctttaaaaaccttagtcagttagaactgtctctgttgcaggtgacagaaaacccagtctaaacaggcttaaatataaaagggctgttagttcatataactaaaaaaagtccagggctagagttacggtccatctgcttctgcctccttggccgtagttccatgattgggctcggcaccatcagacataacttcttcccacacacagctgtgctcaagcagaagccctcaggtggtctccttgatctgtgtggggcctagagttgcttccaccacagcaaaatctcattattgttgctgcaggaaaagaatggatactgagtggcagaaatacgaaactggataaatttttgcctttataagacatttgtttccagtccttctcagactgtataaattctcccaagtcagagagcagaattctcaaacaaaaatgcagggacagaaccaggcacagtggctcacaaggcctataatcccagcactttgggaggctgaggcagaaggatcagttgaacccaggagttcaagaccagcctagccatcatagtgagacaccatctctacaaaaaatttaaaaattagccaggcatagtggcacactcctrtggctgagataggaggatcgcttgaccccaggaggttgaggctgcagcaagctgtgatagtgccactgcactctagcctgggtgaatacagcaagaccctgtctccaaaaataaaaatttaaataaaaatgttttaattcagggacaagcagttcttgattttaaagacgtatctgcyttatgttggggctatcagaattccagttgctaattgattaatctgctctgttaggagaacgtttgttgaatacctgccctgccaggctttctgcttacactggtggggggcacattgacaagattttgggctgtgttttcagggacctccagcagagaagggtcactaggatacaatgtggcatgcatgagctaaaaacagaagtgatttaactctcagagggaaaatggatcagataacacttcatrgagatgacgacatctggttcatttttgaagagtgaatagaaagatcccagccctccataccaagagaataactcctgcaaacattttctgacctggtgcctgaccaatggaccacacatcatcaggaaggctagaaagttgagttccaggagggaatgatagaaggcaaagcctagagagatggcaggggccagacttcaggggcctggggatgtgtacttgcactccaagtcgaggagactgaactttttaccaaagacttggtgttctgtagaagtatgagcagatgagtgacargatctggtttatatgttaagaagttctcagctgtaaggtgaatagattggaggtgttggggcaaaggcaggggacccagtgaagacaaggagcgaggctctatactgaggccctggtagaagtggagcagatgggccacctgaagagctactaggaagttgacaccaataagatgtcgttagtctgtgtatggggagtgagggaaaggaagaacttgccagtttccaggttttaatccttccaaaggatttctgcagaaagacactggaagagctgtattcctacttatccttaaaggaaagaaactgcccttgaattccaaggacatgattactgagctggaattccaaataatgtgtcccagtgagactcctgggggtagttttgtccggtaactgtgtgtgttagatgaaactgcagacttccagccactctatcttaccatgtctgttaacagttaatttgctctgatgaatttgcccatcttggagaagggggctctgctgactgttttttatcttggagtaaatgtcctttgattaggaaggttctagactatattgttaaaacaacattggaaggctgggcatggtggctcatgcctgtaatcccaacactttgggaggccaaggcaggcgtatcgtttgagcccaggagttcaagaccagcctgggcaacatgacaaaactctctctrctaaaaatacaaaattagccaggcrtggtggagtgcgcctgtattcccagccacttaggaggctgaggtgggagaaccacctgagcccaggaagttgaggctgcattgagccatgatcgtaccactgcactgcagctaggtgacagcaaaaccctgtctcaaaaaaacaccaaacaacataggatactgttatataacagctagttcctatacctgtaatcttaytaattcatttaaaatacatcagtgcgggccgggtgtggtggctcacacttataatcccarcactttggaaggccaaggcgggaggatcacttgaagccacaaatttaagaccagcctggrtaatatagcgagaccctgtctctacaaaaaaaataaataaagaaaaaataaaatatgtcagtgtgttttgggaacaggttgagagcatagcatgctcatattatatattcattttaccacttagatttgaattgaggcatctcttagaataggttttattttgtgcataccctcagaggacattgtccctctcatagaaacagatattcaaacatgtaatctgctattttattttaaggtaatagatttttatgattactgtttggaaaaaaaaaaagcaactataggttagcagttgctccagaatctccaaaacaagcttaggagatttttattctttaccagaaatgagatggcttgggaggaaggtgtgtgcattacacacaggttgctctgtggtcactgctccttcatactgtgtttctgcctctgcctgaacccaaacccctcccagcctgacagaaatgttcgcttacgcagctagccctgcctcagtttgtacatctacctgtcggctgagacatcagaagtcgatgtccatgtcagcctctgggcaccccaagatgatgttacctccaatagacagtgaaggagataacttcaaggctatgtaagaaaaatgcacattctttgtgaaactaatgtgtacccactgcttcttaattttgtgctgtggattttatagtctgagattttgttacagttgtccacaaggcgtccttcctccatgtgattttagttaagcacatcttttgtcatgatgtcctcggttgtgtattgtgtgtcttcgtgccttcgcgtactacaaaatgtataagaagttcctgctcctcccaagttgctttcagcatgtggaattttatacatatatcatttgtttacttccaaaactttttagttgcctgttcttcagttacgccagcatatcctttatttctttcgtattggcacagttctctatgtaagcaatttgagagggaagcaaaggggaaaagtttgagttagctgttctctgtcctagaatttccctgcattaatcttgtccttgaaaatatatataatactggtcccttaaactccatgaggctttgtctcattatgtattgttcttttggtaccctttcccacttaacttaccttttgctcctaagtcctataaaataccccttggatctggattttttatacccgattttctccactgtgtataaaaggtatattgtgactgtaaatttttgtatatcatgttctgagagcttcttactttctgatctcatagcactattcctgatcagagaactccagttgcttcaacacacagtatcagtagtgcagccaccccagatcgaatccgcttcccaagagkcactgccagtcgtagcactttccacggccagccccgggaacggcgaaccgcaacatataatggccctcctgcctctcccagcctgtcccatgaagccacaccattgtcccagactcgaagccgaggctccactaatctctttagtaaattaacttcaaaactcacaaggaggtaagtgctaggtgctggttgttttggagtgaacacatagagcaaaaggaaagatgtcttttttgttgtgtgaagccactgctacctggatgcttttcagtctgccttcagctcatggttttctggttttatatatatctaactttatactttaaaacctttaaagtagaaattgtagagctcagagtcttcataacactaaaagttaactagcatttaggaggtttttgttactgttctttaattattgttccttttgctcacgtatctgtctgcatggcatgttcgttgttgttgagcaggcagacctcgagttctggtgtggggtggggggctggcactctgtaacaatcagcaggaaagaccatgcatgtctttcataatcatctccagccccagaggaaagagacagcttctcttttctcactttattgttgttaaggagcagtaaatttcttaagagtccaaatcttgaaagtttctctctcagtcttagtaatttatattgagagcaaggtaatgtccttaaatggtatagttttggagataaaatctctggtttattatcaaaaaataatgttactattattaagttatttttattaaatgctgcatgattcttggctgatggtcctggaaattttttaaaatgttccatgtgtctagtaggctagcatctggggcctcagtaaactctcaagggtcctttgagattaacttcatttccgtaaccttgttacctgttacaaaagcccagaaatactggctgcttcaagaggaaaaagaaaggataccactttgaaccgtaaacaatagtgaaaggcacctttccgagaaggagcccaggaaacccaagagcccctgcagtttcaggacatccttggagaaatgttttgaaattaagcctagctgtggatgagtctgtctgtggtatcttgcaggtttgcctaggacggaccctcttatttgtcatctgtagcttacaggacagcagtaggagtctttcccgagtctgaaatgatcagtaccctcctctgtttttctgcattccctatggcctatagcctattacttcatttcactccatctccattatttaaactaagctaaatgtaatcttgtattcgatcatctgaaacttcggtgagtcacattaaagtctgatctacttattattaggacatggaatagattagggagtattcctttttttttttttttttaatttttttttttttttttgagacggagtctcactgtcgccaaggctggagtgcagtggtgcaatcttggctaacttcaacctccgcctagattagggaggatctctgacatccattagcattaactagaagtcagacgcrtcagaaggtttctatttaccctcttactcacttcttagcccctttattaagccacctcattttaaactgggcaaaacagaatcagccaaagagctttgccaggtttgggacaccmattcatgaccagccagcaagagagacagtgagttcaatctgagaagagtctggtractcccagaataaaccattccttcctggccagccgtggtggttcatgcttgtaatcccagcactttgggaggccaaggcgggtggatctcctgaagtcaggagtttgagaccagcctgaccaatatggtgaaaccccatctctactaaaaatacaaaaattagccaggcatggtggtgggcgcctggagtcccagctacccaggaggctgagacaggagaattgcttgaacccggaaggcagaggttgcagtgagccgagatcgtaccactgcactctagtctgggtgacaaagtgagactgtgtctcaaaaaaaaaaaaaaaaaaactttgagtttatttttcttctttgtactcttttttcagtcattttaagactagtattgggctgggccggatggctcatgcctgtaatctcagcactttgggaggccaagaggggcggatcacctggggtcaggagtttgagacaggcctggccaacatggcaaaaccccatctctactaaaaatacaaaaattagccaggggtggtggcgctcgcctgtagtcccagctactctggaggctgagccaggagaatcgcttgaacctgggaggcggaggttgcatctagccaagatcgcgccgctgcactccagcctgggtgatgacagagcgagactccatctcaaaaaaaaaaaaaaaaaaagactagcattgattggccaggcatggtggctcaygcctgtaatcccagcactttgggaggccgaggcaggtggatcacctgaggtcgggaatttgagaccatcctagccaacatggagaaacccagtctctactaaaaatacaaaattagccgggcatggtggcacatgcctgtaatcccagggagactgaggcaggagaatcacttgaacctgggaggcagaggttgtggtgagccgaggtcacgccattgcactccagcctgggcaacaacagtgaaactctgtctcaaaaaaaaaaaaaaaaaaaagactagcattgattttattacatgtatataatggaaaaaaggaaacaagattatcattgataaaaatatcagctacctctttttttttccccacagagtctcactttatcgcccaggctggagtgcagtggcatgatctcagcccacggcaatcttcgccttccaggttcaagtgattcctgtgcttcagcctcccgagtggctgggactacaggcgcccaccatcgcgcctggctaatttttgtatttttagtagagacccggttttatcatgttggccaggctggtcttgaactgctgacctcaagtgatccaccgcgcccagccaaagctaccattatttgaatgcttattatgtgctaaggtagatgtctatatacatagatacagtcatattcattttatacatataaatatgtatgtacattatatatatgcatattttatgtataaaatgagtatcatatatatacacttatatgtgtgaaatgagtatatttatacacatgtacaagtgtgcacacacactcatttaatttaatctccatagtccaccccattttgtaaaagaaactgaaggtgaagtttggagagattaaggcacatattttaaaaagtatcagggcctggtgcagtggcttacgcctgtaatcccagcactttgggaggccaaggcaggtagatcaggtagatcactcaaggtcaggagttcaagaccagcctggccaacatggtgaaaccccatctctactaaaaatacaaaaattagcttgatgttgtggcacatgcttgtaattccagctatttggaagggtgaggcaagaggatggcttgaacccaggaggcgtaggttgcagagagccaagatcacaccattgcactccagcctgggcgacagattgacactccatctcaaaaaaaaaaaaaagtatcaggctgagccaggtctatctgaccagactctgcccttttagccactacactgtgctccctttagaaaaaacagttgcaggcgtgacagttgcattacatttatttcatatatttgaattaaaattggagactcaggcttgttgtttaaaaaaattctaagtggtcatcttgtttacaatttccaggctatttccacacccccagatttttgcagaaagatagtcttttatcctgtcttgttaaagtttattaactgaggtctgttgtctcccttagtgctatacttaatcagctactgacagtttgttcttaaaaacaatcaaaatccttgctagagtggttgaaagttcttatcctcctttagcaataattggtaggattaaaattgcattgcctgaaaggctgaggtgtttgcacttagatgctgcaagggagacctggtgtggccaggtctggagagggctgcagtcaggaagcctgcactctgcttggagagcacatggctttggagagctatgggctatttgtagtcgggagcaaaactctctctccttaggatcaggcctggccttgctcagagactgcagagtcacccataccctgcaggcagaacagccaggcacacgcaagtgcctctgccctcaggttgatccatgttgccatgggcagtgtgaaggcctcctcctgcagctgcctccttcctctttatacctcaagggattataggaggaaaagttaagaaaarcacttctatagtaattgaccagtaaccctgatttttccggtggaagattaggaaatgtccaggcaccatggctcatgcctataatcccagcactttgggaggctgagccacatggatcacttgagcccaggagttcaagaccagcctggacaacataatgagaccccatctctactttttttttttttgagacggagtctcgctctgtcacccaggctggagtgcagtggcacgatcttggttcactgcagtgtctgcctcctgggttcaagcgattatcctgcctcagcctccccagtagctgggactacaggtgcatgtcaccacgcccagctaatttttgtatttttagtagagacagggtttcaccatgttggccaggctggtcacaaactcctgacctcaagtgatccgcccacctcagcctcccaaagtgctgggattacaggcatgagccaccacacccagccttttatttttttaataaaaagaaaaaaagttgggaaatgggccaggcactgtacatggctcatgccagtaatcctgacactttgggggaaggtgaggcaggaggatcatttgaagccaggagttcaaggctgacctgggcaacataatgagacccccatctctacaaaaacattttttaattagccaggagtggtggtgcatgcctgtagtcccagctacttgagaggctgaggcaggaggattgctcaaacccaggagtttgaggttacagtgagctatgatcacaccactgtactccagcctgggtgattgagcaagaccttgtctctaaataaataaatatttaaaagtaaaagaaaattaggaaacraaaatatatcttaaagacttttaatcattttcaactaaaatattttggataatactgccttatatttaggyagtatatattaaagattttcacatgcatgattgtactgtcgatgaccctgctgtatactactgatctgattatgaagtggttggcagttatttatagtagttagactttttttaaattggtagattaatacctaaagcaatgccaaagttatcccaaccaaggatttcattaatttagtcattcagcagatatagatgactgcctgctatgtacagttacagaactggactttacaaatagaaattaacaaactcagcctatttttgcccagggaagctgatcgcattgatcataaaaacctcattcgtagtttgaaaaatattttgtcagattattttcagcacaacctgcacatctccttaaatttttttaatgaccagagttaccccttttaaatagaattcttcgtgtttaytacataaaagtaaaattcatactgttgtcttgacacttagtttttattcattttgagatctaagactgaaaagtctrcttgtttaaatccccaatcacctatttttttcttaaaaagtgatttatgtcataccactgtagcaaataatatgttaatgtttgtttcattttcctgaaagaagtaatgatttttacttagtggttaaatattttataatgaaatttttaatgtttatgtaataaggcaagatttttgttcataaggtattctgaagaaaattgaaaaatgttttattactagtacattgcaaatgtcttgtcacttctttaacataagacataaattttatcttagaaagtgtatctggccattgcagtggctcatgcctgtaatcccaacactctgggaggccgaggtgggctgatcacttgaggccaggagttcgagacyagactggccaacatggcaaaaccctatctctactgaaaatatagaaattaactgggcatggtggcgcrcgcctgtgattccagctactcaggagactgaggcacaagaattgcttcaacccgggaggcataggttgcattgagctgagattgcaccactgcactgtgacagagtgagactctgtctttaaaaaaaaaaaaaaagtgtgtccatctgaagaacttttaattacagctaatgtcaatatgtactgctaaaccttttcttacttttttttgatatattaaaagatcacatactcatttaattacctgtaataattttactttttcaacaaatgtcagcatttctttgttcattggccagagaaggaaccctgctttgttttttttctttctctctgtaattgattagattttctgtttaatttgtgcgagttatttttgttaatttttttttttttttacttaatttcttttagaaacatgtcattcaggtttatcaaaaggtaggatttatatatacacatttatttttcaatcctcactcccaaatggctcctgcaattaacattaggtttggctttctggccctgttttttccttataaactaaactttctgctgataactaaatacttaattccttgaaaggaaattgaaaagaaatagattaactctgtcaggcattttaaagggactatggtacccatgcaacaaaaggctgatgcatgctctgtgtattttctttctttggtagaattatttagcatccaaataattctgtcttcatactaataacacttagcatgctcctgtttgaagaatgagatgctcagtaatgttaatgtacaattaatgattatccacaggcatgcaaaaggtaagtattagttgtgttatttttatttcactgaggatggaattagcaaaaggctttaaaatgacaggaaaattagctaatacagaaaacaagcataaaattcaaagctacagcctcatttgatttggctttttcagaaattaaaatgtgaacagctgcgtagcagaaatgttttaatattttcagagttgaaagccactttccagcaaccactgaagaaagagtatctcattatttttacttaaagcactacagaaagtggtgttctgattttattaatattttttagrccaggcatggtggcttatgcctgtaatcccagcactttgggcggatcacttgagcccaggagttcaagaccatcctggacaacatggcaaaaccccgcctctacaaataatataaaaattagccgggcatggtggcacgcatctgtggtcccagctactcaggaggctgaggcaggaggatcacctgagccctgggaggtcaaggttgcagtgagccatgatcatgccactgtgctccagcctaggggagtgagaccctgcctcaaaaaagaaaaacatattttttgatggtgataatcaagaaaccaaaaatattgctttcttaatgcacacatgaggcaggaaatctttcctgaagggctacattgtacctgtgcctctcaagtcaccagaaggccaagctgcaggtcaaaactgcgggaaaagcactttcttcctgttggcagttccattctattattattttttaattgatcttcccacttgtctgatttttccttggacagaacaggtaataactgaatatagaatccagctgatagcctcattggcttttaattggaaacccattatactgtgtggcacaattagaaagtgagaataaccccattctgaggccgagtgtgctcaggctgaagagccagcaggagtgcccgctgtgcgtgcgtggtgtgcggtgtgtgcagcagtgtgtgcagtgtgcagcgtgcagcggtatggcatgcaatgtgtgtgatgtatgcagtgtgcagcatggagctggcccctgtgcacacccctgcagccttgtggaagaaggtagcgctggctcagtcaaatgagaggaagagttttcataagcccggctggtgtttaaaacgtgttttggctttgttcattttatggtgttggtgttggtattggtggtcatgtactggcatgtaagatttcttttctctttccctcttctctctgcttctacattctgttcattgaggcttccaactgaatatgagaggaacgggagatatgagggctcaaggtgagggaaatgatttttacttaaaatttttttcaggtgtttacttcatttctgtggcagaggcgactattttctgaatgttccctactgtattcctgctgtctctgtaggagttacgtagagagggtggccacaagggggcgccagcctgccatgagcaccgtccagatccagcttggcctccgctctacatttgtgtttgtgttcaaagcacggcgaggccttcagccttcctgcctgggcgttaacagcctttggaggtctgggttgggtagcagtgctcagagaaataagccctcagttcatcactgacccctcacatggttctcttcacaaggaataaaagcaaagtacttaatagaatgtccatatttcaaactagatatgttttcttctaagaatggtgattatatagttgagtgttttgcttttcttttttttttttctgagacacggtgtcgctctgtcacccagtctggagtgtagtggcgtgatcagggcttactcragttcccaggcttatgcgatcctcccacctcagcctcctgagtatctggaaccacaggcactgccaccatgctggctaatttttgtattttctgtagagatgggggtctcgccatgttggccgggctggtctcaaactcctaggctcaagtgaacctcccacctcaacctcccaaagtgctgggatgacagacatgagcccccgcacccagccttgcttttccattttgtatagttatcattgcatggatttgrggggaggcaatcaccaggtagccttaggactctatgtcccttgytctaggtctcttccacttgtgccctttttttatgccagtcaccagcaggctatttcaggtcctcattcaccgtttgtccttttggtctttctaaaagcccgcttctggtcatatgacctttctgaattaaaaccttcagtgacctccactatttcacctgrccacgtccctgcgaggccctgagtggcgtggtccaggctgccccagcagccccagctctgctgccccatcaaggcagagcactagggtgagtgccaggcagcattccctctccaggcctacccatcccagccaggagcaggctctagatcctggtttgtttccccacccataataggaaggtgacataataggacctacgtgggcatcaagtaagttggggcctgaccaccacaagtgctcattaagtgccaccagctgttgtgggggtgatgacactgtgcctccagttccactcagtctgtgtactttattatsccacagacacatcctgtactttcctacctcccctttggctgtgatcccctctactcaaaacaaacactcttccctatcttcattgcattttgttgaaatcccatggctsttcatagctctcctcagatgcaggcccacccccacccgtgctgtttcctccttgtctcatcctgcctgtcacgttctcctgctcggcgggctccacctcttctgctgccctctaggagatggccagcctttcctgtgctgccactgttgtctcaccttacagtcttcctggctccagatgagtttgagagcttttgcttatctttktaacccatttagtatctaacgtggcattttatacataggaagcttctctcatcagtattggtggatgtgaaccaaattgaatactggcaggttggtgacacggagagctatgtgcatatgcaaaagctgtagcccctcacctctggttagttggccataggatggagtgtacttaaggtacatagactattttactcccaagaatgctaggcactcactgtcttaattgaggccaccagatacacacatgagaatataaataacggcttgtggcaataatgactaaatgccaaggagtggctggtaaaccgcggtgttccctagagaccccggcctgggctctacttaggctgcctcttggacatcagaccaaggcttacattctgaatccacagggcatccacatgggtggtgtcagtcccccacagacagagaagtgtcccgttgcatttttccatctattccagtagtaagattgtgtcatttgagattttctttaactgtataattggacgtttaattaacaaaccagagaggaggaaaaacaatgaggtgggtagagcatcatgttcagcctcagggctgtacagcaaagcaattttagactgcggatgttgagtctccagttaccctgagtgccagttacagtgattcacatctgaaagaacagtactgcaggagagggacagcccagggtggatgggtggggtgggcaggagctggctgscaactccttccctgagctgggcctgcagagccctgaggagtggggcatgctgtcctttttgcctgatttccaaggattctgcttaacgaattacttcgttcattttagtaagcacaggtggctggtgaagattttccagctaggtagatctttttgtgtgtggcttatgacttttagggggtgagggaagaaaatagacgaaaatagacttagttacaaatgtgagtctgtgcaggaaaatgtggaggtcagtcgttagttgtgttgtatcaaagacgtgaatgaggaactagctgaagtgtaagaggttgattttcctgtacgattaaaaataaacctgcctctatgcatttcagtcgcaatgtatctgctgagcaaaaagatgaaaacaaagaagcaaagcctcgatccctacgcttcacctggagcatgaaaaccactagttcaatggatcccggggacatgatgcgggaaatccgcaaagtgttggacgccaataactgcgactatgagcagagggagcgcttcttgctcttctgcgtccacggagatgggcacgcggagaacctcgtgcagtgggaaatggaagtgtgcaagctgccaagactgtctctgaacggggtccggtttaagcggatatcggggacatccatagccttcaaaaatattgcttccaaaattgccaatgagctaaagctgtaacccagtgattatgatgtaaattaagtagcaaktaaagtgttttcctgaacactgatggaaatgtatagaataatatttaggcaataacgtctgcatcttctaaatcatgaaattaaagtctgaggacragagcacgcctgggagcgaaagctggccttttttctacgaatgcactacattaaagatgtgcaacctatgcgccccctgccctacttccgttaccctgagagtcggygtgtggccccatctccatgtgcctcccgtctgggtgggtgtgagagtggacggtatgtgtgtgaagtggtgtatatggaagcatctccctacactggcagccagtcattrctagtacctctgcgggagatcatccggtgctaaaacattacagttgccaaggaggaaaatactgaatgactgctaagaattaaccttaagaccagttcatagttaatacaggtttacagttcatgcctgtggttttgtgtttgttgttttgtgtttttttagtgcaaaaggtttaaatttatagttgtgaacattgcttgtgtgtgtttttctaagtagattcacaagataattaaaaattcactttttctcagtaaaatcttgcattgtctcctaatgctgtatttaacacatcctcaagttgagcagaagtaatgtgtatgaaggcttggggccacgtggaccttcgcaggggtcccagcattttgtgattaccagcatattttttctcccaaggcaataaagagagaagatggccctcatggtgacccaagaaggaagggaatccagagcagctgcagcttaaccctgggagttgtggcacagccctatggagaaacaccaggtcttgacagttctgggttggttctctgtgaagtatgtaaatttcctttctcctttcttgtgattcagtacatgaatcagacctgcagcttttttccaacacctacatggttgtgtaggggtaatgagctcataactcattgtgttgctttattctcacagggaagttgtcacactgattggtgtgctattctgggttctgggtttgttgttggtcagagtatgaaagtctggaggccggacacagtggctcacacctgtgaacccagcacttttgggaggctgaggctggaggaacattgagtctggtagttcaggaccagcttggacaacatggtaagaccccatgtcttcaaaaaataaaaacatgggccaggggcggtggctcacgcctgtaatcccagcaatttgggaggctgaggcaggcggatcacaaggtaaggagatcaagaccaacttggctaacacggtgaaaccccgtctctactaaaaatacaaaaaaattagccgggcatggtggcgggcacctgtagttccagctacttgggaggctgaggcaggagaatggcgtgaacccgggaggggagcttgcggtgagccgagatcgcgccactgcactccagcctgggcgctagagcaagactccgtctcaaaaaaataataataataaaataaataaataataaaaacatcagccaagtgtggtggcacacctgtggtcccagctcttcgggatgctgaggtgggaggcttgagcccaggaggttgaagctgcagtgaactgtgattgtgcacagcactccagcttgggcaacagaatgagaccctgtctcaaaaaaaaaagaaagaaaaaggaaaaagtctggacagtcaatcagaaatattgttgtctctctctagcgtgggcaaggcactgttgtgattgagatcctcagcaaaacagacacctctctccttgagcctgacattctaggcagtggataaacaagtaagttacctagtatggagcacagcagcacgtgtgagagagcgcagagcaggcacgggtttcatcagcactctgggtgtgaagagtgctgcttgggcagaggcctgggtgggcacgttcacacagatttctggggaagagcactgcttgggcctgaggcctgagtgcatggcgtgcctggagcagagtgtagagatgcttctcctacatggcagcagctgaggggatgacaagggccttgtggccttgggctttcagaggatcaccaggcagctatgtttggaactcactgaaatggggcaaggagaagctgggaaagccgcctggaggctctcagcagtaatacaggcaagaggtagtgcagccttgggtgaggatgggccttggcgctgatggtggttgggttttggacatgttttgaaataagaggcaactgcattttccctggagttggatatgaggtgagtagagccaaggacagcttcatgatttttgatctgaacagcaaaaaggccggaattgctgtttgttgagatgcggaatgtggctggggagatgtttgggaacaggaggggaagaagatgaagagagcaagctggaatgtgctgagtttgaagtccctttaaacactgagtggcaacgtctagtgggcagttggataaacatgtgaggggttcggccaggcgcagtggctcactcctgtaatcccagcacgttgggaggccgaggtgggtggatcacgaggtgaggagatcgagaccatcctggctaacacggtgaaaccccgtctctactaaaaatacagaaaattagccaggcgtcgtggcaggcgcctgtagtcccagctactcgggaggctgaggcaggagaatggcgtgaagccgggagacggagcttgcagtgagccgagatcgcgccacagcactccagcctgggcaacagagcgagactctgtattaaaaaaaaaaaagtgtgagggttgggagaggtcgggtctgggagagaccataggaagccctcagcaggtggaaggctcctgctcaaagctgtgagacagaggagaaaccaggactgagccctggacacagcacggggagaggccccggggagaagaagtgaagctggcaaggcagcagcaaggagggagggccctccaggtgtcaggcaggtggacatcatgacctaaggctcaccttgcgggaactttctaacttgacttttagcaagtaagtccccttccctctctctgtccagtgcctttcagagtggagtcctctaacggagctgattgtgcccagtcacagacagtgaggacttccccagctttttttgcctggtgcaagctggtttttatatcccattaaagcatcataaagccaacccggacaagagaattgggatgtctctctgcacacatgagcctttttgtttgtttgtttgtttccccggagacggagtcttgctctgttgcccaggctggagtgcagtggcgtgatctcggctcactgcaagctccacctcctgggttcttgccattctcctgcctcagcctcctgagtagctgggactacaggcacccgccaccatgcctggctaatttttttgtatttttagtagagacggggtttcaccatgttagccaggatggtctcgatctcctgacctcgtgatccacccgccttggcctcccaaagtgctgggattacaggcgtgagccactgcgcccggcacacatgagcctctttaaggagatctacacacagacttctctccccctttgctgtccttgtctgtcactgtcccttctgctgagcagaaaaccaaggagatgttctgccataaattacttcctcctctgggtagatgtttctgagctgttctatgaaattcatgactacgaaactgacttccttaagattcctaccccaaggccaggcgcaggggctcatgtctgtaatcccaacaatttgggaggccgaggcgggtggatcacctgagttcaggagttcgagaccagcctggccaacatggtgaaaccccgtctctacaaaaatataaaaaaaaaattagccaggcatgtggcgcacacctgtaatcccagctactcgggaggcggagacaggagaatcgcttgaacccaggaggcgaaggttgcagtgaaccgagatcttgccattatgctcaaacctgggcaacagagcaagacttcatctcaaaaaaaaaaaaaaaaaaaagattcctaccccagaaacacccatcacagcaggttcctgtgcataatttctgcagaggtggagcagagccctgccaagcagaggctgggccacagcggacttcctcttccttatctttgtagctgggactgattttgaattgttttccatttttgcattctcaaggacacattgagtactagaagttaaattcctttaagaaaaatgagtttctggaatgccctgatgcagtggccactctttatgctcgtattttcttgaggggctcacttgtcataagcagtggctgcgttttaatgtgttacttggtcaaataaggagtgcgtgtctcagagactagtattcatccacagaaagttacccaagtgcgttatgtttataagactatgttactaattgatcttggcttgattttcatggcaacatgggtagtattccctttaccaaggttaaaatgtgaaaactcattcattactaaggttccaggccctttctatagattctccattctcagaatgtgacatttttattctgcatacaatgaattttgaaaagggatattctacgaccattgaaaatcaaaagagactgcatttttccctcatcaaccacctggaaatctctcagaagtgaggtgagacacctagtggggctgtgctgctggtttgatttacctgccaagcagagcattctcctaatcctgacaatggtgttcctcttcgttgagtgccgacttccctctcttctacatcaggcacattagaggaaccaaaaccatactcctacaagtaagtgaggtgcccagctctcaggccacctttgcatttctgaaagtgagggtccatgcagaaaactgttacagaaacatgactggcttttaggagcacagccgtgatcattttcacagcatatgcttctccaaaagcctagacaataatgatttctattttattttattttatttttttatttttttaagacagagtctcacgctgtggctcaggctggagtgcagtggcgcgatctcggctcactacaagctccgtctcccggcttcacaccattctcctgcctcagcctcccgagtagttgggactacaggcacctgccaccacgcctggctaattttttctattttttagtagagacggggtttcgccgtgttagccaggatggtcttgatcacctgacctcgtgatcctcccgcctcgacctcccaaagtactggaattacaggcgtgagccactgtgcccatgatgatgcttagaataatgatatttagaagaaaaacctccatacatgggcctgtgaataaattatagtcactatggaagctgcgtcaggcagcccctacccagtaagcgaccttcgtgctgaccttcaggtctgcagagcagttgccccttccatgggtgtggcaccaggcagagcaggggcagaagaggggtgtttcccacgcactgtcccttccagtccgtctcagaggggcatcaaaatgagaaagagcttgtgctcaagagttgaaaccttacgactctgttgcaggttttttgtttctttcattgctggtttgccacgcagctcaggggccctttagacgggagagattgttgctcttcaagggagtgaagtgaagatggtgccttagaggtgttctgacagtgcacggggagtcccggagtgactcctccatgagtggaaggaactcagtgtcattgccagtcgaggagaaaggaaacagttcaacagctatttttgtttgttttgtttgtcttgggtttgttttgtttcgttttgtttttgagacagggtttcgttctgtcacccagactgaagtacagtggcgcaatcacagctcagtgcagccttgacctcctgggctcaagtgatcctcccacctcaacctcctgagtagctgggaccacaggcttgtgcccagctaattttatttttcgtacagacagggtcttgttctgttgcctaggctggtttgaattcctgggctcaggcaatcctcctacctcagcctcccaaagtactgggactacaggcgtgagccacctcacccagccccaacaactatttttgaatggttccttgaaaagttccattaaaggccaggcacagtggctcacaccaataatcccagcattttgggaggctgaagtggatggatcacttgaggtcaggatttcaagaccagcctggccaacatggcaaaaccccatctctactaaaaatacaaaaattagctgggcgtggtggcatgcacctggagtcccagctacttgggaggctaagacacgagaatagcttgaacccaggaggcagaggttgcagtgagccaagattgcaccactgcactccagcctggatggcagagccagaccctgtctccgaaaaaaaaaaaaaaaatcacacactaaccctcttctcttcctccctctcctggcttagccagtgcagtcaagtccttgaatggcgtgctccctggccctcaggagaggacattgcctatcgagtggagacttgg

SEQ ID NO: 8777 - DNA, 26772 bp, Homo sapiens
catagaagctttagaagcagattctgctgctgggagaataagttacactgacctcaggacaaaagatgtacatgaactaaataaaggacgacaaatgcagaccacagcaataaagtctgtggaattagtatgtgagaaattacacaatggtctaaaatattagtcttgaagggatcttaatgatgatttagtcatttcacatgtgcaaactgttaagactgctggctgtttttcacatggccaccagcccatttctttttcctgagtgtctgcagtccacagagcttcttctggctctctatgctccatctgttctcggcccaggagttcccatgggacctcccaagggtgactcaggtctcatcttccgataagataaaagaaataagacagatattcggggtagagatgtaagagcatggtgaaagacagactgctcctgtttagatccatatataaaagctttattttttgaatcccaaattccatcccttggtcatctgtactggttcattcaataaatatttctgaggctgggcatggtgactcaagcctgtaatcccagcactttgggaggtcaaggttggtggatctcttgagcccagatgtttgagaccagctttggcaatatggtgaaaccccatctctacgaaaaatacaaaaattagctgggcatggtgatgtgtgcatgtagtcccagctattctggaggctgaggtgggaggatcacctgagcctgggaggtggagactgcaatgagccatgatcacaccactgcactccatcctgggtgaaagagtgagaccttgcctcagaaataataataataatgataataagtaaacatttctgagcacctacttggtgctcttccaggcacatgagctatatcaatagacaaaactcacaaaaataatcttgccttctggaggtcatattccaatggataaaacagaaaataataaacatgatgcataagtagaatgttagaagtgatgaatgccttagaaaaagattggagcaggttaaggagatggggattgggagaggagacattgcaattcaaaattgattggtcaggaactcaaacaaatacttggacactgatagcagcattattcaaaatagtcaatagctagaagcaacccagatgcccattaagggatgaatggataaacaaagtgtggtaggcacacacagtggaatattattcagtcattagaaacaataaagtacagacccatgctacaatatgaacaaaacttggaaagattatgctaagtgaaataaggcagtcacaaagggcacttattgtgtgactccatttataggaaatattcagaatagataaacccatagaatcagaaagcagattggtggtggctatgggtttgtggtggaagaggaagaatggggacttcatgttaatgggtatggggttatactcggggatggtgaaaatgttttgaaactagatagagttagtggttgtaccacattgtgaatgtaccaaatgtcactaaattgtgcacttcgaaatagttaattttatgttatgtaaatttcagcgcaatttttaaaaatcagaagcaaaaaaaagaacagaaaattgagtagttaggctaagtctcacagagaatgtacagtttgagtgctcacttggaggaggtaagttagctcttggaggaggtgggtaacaggaagaagctgtccaggcagaaggaacaatgtctgcctagtgccttcaaggaacagcaatgaggatacggggttggaggggaggggtcagagaggtgattggtggtgttccatcgtgtggtacctcccagcttctgtaaagacgttggcttttcctctgggtgaggtggaagactttggaggcccccttgatttgacctaggttctaacagaatctccagagtgtctgttttaggaatatacttaagagggtacaagtggaagcagggatagcaatttagaagcagttattaaaatccaagtgagagaccatggtggcttggacaaggatggtggcattgagaatggagagatgcaattgcaggtaggatgtcctttgaagatgaaaccataagttgtcctgatggattgcatgttcaatatgtgaggaagagaagagtcaataataaatggagtcttggtctgagccaacattcagcatggagttgtcatcattacaattagaagacaatgggagatgctgaattttctttggggcaagggaggcaaggaggctggaggagatcagaagttctgttctggagacatgaagcttttgtgaattccacttgttccttgaatatatgatggtttcttctgtttttgtttgtttgtttttttaaattttagattctaaggtacatgtacttgtttgttacaaaggtatattgcattactggtggggactggtcttacccaaattgtgaatattgtacccagtaggtaatttttcattcatcaccccctaccctccctacttttggagtccccagtgtctattatttccatctttatgtccatgagtacccatggtttagctcccacatatgagtaagaacatgtggtatttggttttctgtttcttaactggttcacttaagataatggtctccagctccatccatgtagcaaaggacataatctcattctttttatggctgaatagtaatccgtggtgcataggtacaacattttctttatctagtcaaccgttgatggacacttgagttggttccatgactttcctattgtgaaccgtgctgcagtgaacatactagtagaggtggagaggtgtcttttttatacactaatttcttttccttagaaaagtagtgagatttctgggttgaatggtagttttacttttggttcattgagaaatcttcatactgttttccttagagattgaactaattgacattcccagcaacaatgtataagcattcccttttctccatatccatgccaacatctgctgttttttgagtttttgataatagccattcagacgggtcttctggtttttggaggggaggattgggtgaagcaagaaggagtttggagggaaggagtggaggcttgagtgggcctcgagtttggagtatgggcaagaaggatcccagagacaagcactttgcccacagctacacagctaatggagctggggggcccagcatattctccagaggcccaggctaggccgtctaggggcatgcttgttctgccccatccactgcaggtcctgaaaacattttcatcaataaaaaaaaataaaaaaacagaataaaaatgatacccagatgtcctctagtgaaatgaggggaaaaaaaaaatccatccccggcttattgtgagagtcactgaatgagagcctgactcactgaaattcatataagattaatgtaaccaagttccctgtcttttgacactggtttacagtaagagcaggccrcacatggccagctctggagtgtgttaggacatttacattttacatttcagtgtgatatctgctaagtcaaatgaagaagtcttgaaagataccttctaagttcggaagtatttgagtgtcacattccatatgccagcagttagttgttgccctcaaaacataaggttttgtttgttcttttgttttttgtttttttaatggttatgtaagtgaagtagattataaataggcacatacaggatttcaaaactgtaacaaaattaagaaaaagctggttcaatgaggttagattctatgagattaatctgaaaagggagagtagttatgagaagtcttaaaaaagtgggtgtttgccagagaaacaagcggacactggaagatttctgattaagttggcagaaatttatgggtgcttaaaatgccttgctttattcatgtattagaagcccttgcctttttgcagtttgtcttaagttgctataaactactctctgttatgttgaatggtgcctgaatagtgagaagccaaaataatttagttcttttcaaagaagaaattatagactagcttattttaataacccagtccaaattataaaaagaaaagctttaccaccctaatctctggtatagagaatgttctctttttttagttgacattggggggaaaaaaagcttgactttgaagttcagcaagtctggtttcaaccccagccacaactgggtgaactttgtcaaattacttaaacagtcttatccttgggtttttatttgtaactataaaatttgagtgatgttaatgataagtaccacagagtattgtactttgaatgaaaggtcttaattgtcaaatgaacaactgaattattttataggaagagttcaactttaataaatactcctgcagaatttcatcattatgatgttaaaattgatggaagctttattttttaaactgagaaactaatgcttacgtggcctagtttaagaatgaatgctccaacttaatacatgttttaaaaagatgttttgggataccaaatgtaaaagaattccgagtttgtgttattttattgaacaaacctattcagcacttggggaatcgcaggcagcattgcagactcgctggctcctggctgtgatctcacacccaaactgcaataatatcctgataaaacggacttccacaagtaggtcaagaataataatgtgcagacctaattcctctaatttacggcgaacatctcatggtcaatctccccgcggtcaaaggactgtgtatctcttcctctcagagccactccacaggctgaaaggctgactaaacccctgacagataagagattcaagagtagtcccagcccccatggggagcaaagacgctggctcaaaaaacgtactgataactctcccttttgcagctactcctttctgaaccttccacaagcagtggcagttggattctgtgattagtctagtcttcagagccagccttcttgagttcaaattctgacttcaccccttaatgtgaagtgacatgggcaagttgcttaatctctctgtgcctcagtgtccttgtctgtaaaatgggcatcataataatagcgcctgccacattgggtgagtgtgagaatgaaggaattaatacatgtaaatcacttagactgtgtctggcatagaggacattctaaagaaaagttagctattatcattatattattatatgggtctggaattagttcctgaatccttctgagatgtgatgacttataaacgtaggttgagtttactcatgatagggtcatcgcaactatgcatagctaaaatcaaattttgcttttcaagtttgttttacctggagccctagagttcagggttatggtttcctttgtcactccccttgagggaagcttcttagtcacactctccttctctttctctgcactctatgcactctagaaaagctcctttttttttttcttcatccaggcagagaggcctactgggacttaaatccaaggagctgaaatctgttttgggatggggtggagtcacattctggaacctagacagagaatttctaagttccagaaagtgctgcttacttcgcatttcctctcccccacctttgcttttgaaactcctggcaccaatgctgccaaggctggcggagctttcctgagtggtgtctgccaaatgaggagtcaaggaatatctggaaaggcagcctccaggtccccgatgtcaagaccatttagaactgaaagtgtcccaatatcggggtacaggcaataagcattagttattaatcagcctgagaagttgattctaaaataggaggaaatgattcaattatttcctctcaagggattactcaatgttgtttttatgtttaaatatttatttgtcaacatcaagaattcttagtacatgatkcaccagcatttttgaacaagtcatagatttggccacaaatcaaatttcaggatgggaggagtgtctcccctttaaaatagaagagagtgagtagtctatgaggagggacytacaaagactggaaactattcttagctccgtcactgactccaagttcatcccctctgtctttcagtttgggtaagcatcaattacttatctaaaatttgtaataagaaaagtcttcataattcatgattgtgtttatctttatgttagtaaatttctatgttggktctattcttccccttatattttaagaaaagaagtaagaaagtaaatgattatttttctgaaagaaaaaattaatgtatttattattattcatagaccttcaactactcttagaaagcctttggtgactcctgggaacaagctgagtcaggaacaaaagtttgagggtttggggttgagaataggacaattacttggctaatgctttagtctagttctgattttgctactccttagttgctttgtgatgactacttgcacatgtgtctgtttgtgagttatttttgtgagcatgctgctaccagcctgtgtggatgtctgtrgtttcacatgatacattttattttctaaagtctactgaattttatggtttttttttcaaaaatagaaactcatattctttccttcttaatttagtttctttcaggacattctcatgagactggtgaaatataactgcgaagtagcatgataactgtgaaatarcrtgatcattgtgaaagctatatgacccaaaacttccataggaataagtgcaatgcttgcatatctgaaacctgctgttacatctctttgcacttaataaatatgtgttgactgattcrttctcctgggtggtgctgagaaagtaaaaatcatggctgataaaaattctgtttatggttttgtctaacttatttttcagttgagatataggctactcttcccaactcagtcttgaagagtatcaccaactgcctcatgtgtggtgaccttcactgtyrtatgccagtgactcatctggagtaatctcaacaacgagttaccaatacttgctcttgattgataaacagaatggggttttggatcttagcaattctcacaattctcatgtattccacagcagcaaagtttagtaagtattgccttctaagtataatktaaatttttataaattaaataatttcaagaacatttaccttgttttaagcagtttgcttccagttgttccagttgaattgtaaactgaaaaatatattgcttttgtacaatcatttttcattacaaatctatcagaagaaattctttgtaatgaatatatcatcagtttggctttgcatattcaaatgcagcagaatttaatgtggtgcctgcacatgggaagtgttgtggatgtttattgactgacacacagtttgtttagatagataaggctgcttttccattggataactgtgggggatttagctccaaattaattcattaacatttcataagagatcttaacagttacttattctttcccaaggtatcacagtatatgaccggcttctaaatttaatcctagaagaaaatattgagagtataagaattatgatcttttcatttgatcatttcaggattgtctttatatcttttatttgcaggtaaacaatcatggggcctggaaaatgaggctttaattgtaagatgtcctagacaaggaaaacctagttacaccgtggattggtattactcacaaacaaacaaaagtattcccactcaggaaagaaatcgtgtgtttgcctcaggccaacttctgaagtttctaccagctgmagttgytgattctggtatttatacctgtattgtcagaaggtattatgcagaaggctcccatcttctttcaccctgctcccctttcttcagtggttgattgcctgagctgcccttgctttcattccttccctagtcctttctggaacagttaaatttataaaatgatttgaataaaagtgatttggataaacttctaggaatactatcaggttgakgtctagctcattctgagctatttggatttacagttgcagggattgatttgtagctgacttagagaaaaacctagctttcctagtgaccaagataactgagagcaattgcttacttttggctggaattaagaacaaactagcacagaaaatagtaatctggatgttttccatctcagkgggcctctagtaggtgaaaaggggcttctaaccttcaagttaagccacagaaggctgatgagattgtgtgcctaaaaattaattacttttgttcacaaattgttaaatgttttgattttgtggctgtatttggcacacacaaaatgtcaaatgaattaaatcaaaaagcaggatgtattagttaagggcctaggtctgagactagacaagtgtcaaattcatgctctgccactagttaactgtgcgatgccagcaagttacttctctgcccttcagtttccttctctgtaaaatgcatataatgtaataatatatttcatctcaaagcattattgtgaaaataaactaaggtaatgtgtgaaaagtgctcatcatcatcactggtacagagtaaactctgartaaatagtaattatctttattacactgggattacagcattacagcagatgtagtgtatgaataaatggtgaagaagtcattgttagggctactatgggggctatgtttttagctcaagtgtaacaaaaaagtatttaaactctagattttaatgtttatttttaaataataaaataaccattatgtatattgatggtttttaagaagaaaagcaatattaagtaaaggctgaatttagattaagttatttcacaatgytaagtgactcttttaattgtctgacttattttaacagtcccacattcaataggactggatatgcgaatgtcaccatatataaaaaacaatcagattgcaatgttccagattatttgatgtattcaacagtatctggatcagaaaaaaattccaaaatttattgtcctaccattgacctctacaactggacagcacctcttgagtggtttaaggtaagaagaaatttggaaggaaatagatgaaaattacacaattaaaatagacacaagtggccgggcacagtggctcatgcctgtaatcctagcacttygggaggccaaggcaggcagatcacttgaggccaggagtttgagaccagcctggccaacatgaggaaaccccatctctactaaaaatataaaaatcagctggrtgtggtggcacacacctgtaatcccagcagcttgggaggctgaggtatgaaaatcacttgaacctagaaggcagaggttacagcgagcccagattgcaccactcactccagcctaggcaacaaacattctgtcaacagataaataaataaaagtgaagaattactgagaaggaaatggaatttcttatttcagaattgtcaggctcttcaaggatcaaggtacagggcgcacaagtcatttttggtcattgataatgtgatgactgaggacrcaggtgattacacctgtaaatttatacacaatgaaaatggagccaattatagtgtgacggcgaccaggtccttcacggtcaagggtragctactgacattaatgagatagaatactacgtgaaagaagtcgaagtgggaacagyggtgcccttctggttgggtttcttgcacttctccctcctccctttacttcctcctgctccatcttatcttatacattctgaactatgacgcaaagaggttttctgaacacactatcaagatttaagaaatttcmgggggaaattacattactaattcaaagccacatctgttctttattctttytttgtgacttaattttccaaagataaagcaatctgaatgctaacttaacttactttttttgaatggcaatacaactatttggagagcaaaaccagctttttttttttttttctagtttggtgtcagagtttctgcaaattaaaaaagagcttaatctttagtaatactcattggattcaaartytaatgagaggctttgtgatggtatactatggtgtacataaatgttgtcgagtggtttttaatctttgtttgcaatactttcaacatcatcaatggccttgagtaagtcacttcattctaaaaatgtgttttccaagttattttaaattttataaaagcttatttaagggaaagatttcacaatcatagcttatcaatctacaaaggattggggtctccttagcacaagtcgatctacagacgtagatgtaatagcccctttacgtatgacagttttttcagggcaaagcaatattggagacaaatttttggagtttttcaatactccaccgctgtaaaataagcatcaccagaccacattcctatcagtgcctctttctgtttaatatcaacccttacagtggtccttaatcacactgtcattaaataaatgagcatgaagggatggaggattgcagcagtgctccataagcactgcccgtctttcagccttagtggtcacaggagtcagaattccgtayggggaagatttcactgaggatgggccaccctagtggagaactgcgagcaaatctgtggactcatccatttattattttcatgggtcttttgaaatcttctctgtagtcttattcttattctgtagaagagtagttttctaacaactactaggtcatgtaattagttttatgggttggatctgcatttgtttaagtgatatcagagaataatgatattaaagagcatcataggtaataaaagaaagttttatttaagtgcctttctgtttcgtgtgtgtgtgtgtgtgtgtgtgtgtgtgtgtttgtcattatgggttattgtcagaagaacttgaaaaacattgctatgaaatagaatagaaacatgaaaatacaagctttatattgactagcattcaatgctctcctaatatttatatttctttttgtctttaagatgagcaaggcttttctctgtttccagtaatcggagcccctgcacaaaatgaaataaaggaagtggaaattggtaagaaaatttatcagaatgctgtaaatattgcctggaaaaatccttccatatgacccctgttctgaattcccttagcaggggtcaggcaattagcataaggaaccttgaggagtaagtgaggtgacatccctgaaagcacctgccccaagcatttgctaatattgggaacagggacacagcaattgcagtgtttacatttgtttattgtactttgtaattcatgatgctttcatgtatgcatctaatttcatcttcatctctatcccagagcttgggatggagacctgcagggtgttcattctgggcaatggtagccagatccrgtaaaacatgtttatcttcaaagtagcttatggagagatgaagagagttctgtagaaagatgtggaagagggcagttggaaagaaactctaatttctagtagagggcaatccttttactagaaatcctttgtaatgtggggttggtgaaggcagaatcattggccttgttagtttcccaygcagatgagaatatagtgggagctgagcttcaaacccagctgggtgaatgaaggtaatggaagcagggaggaggcaagagaggacatagaaagaggaaggtgctagagatgagggagggaggtcctggtggggtgcatactaagtgttcagtaaggttttttttttacattaaatgggataaaatgccagtcgcagaagttaattttattggtgaatgtccttactcccctctaggaaaaaacgcaaacctaacttgctctgcttgttttggaaaaggcactcagttcttggctgccgtcctgtggcagcttaatggaacaaaaattacagactttggtgaaccaagaattcaacaagaggaagggcaaaatcaaaggtatttttrtattgaagagaaccatcctcttccccttgcacatggtttgcacctgcaaagtaggcattaaaagtaacaggttgctttcttagtttcagcaatgggctggcttgtctagacatggttttaagaatagctgaygtgaaggaagaggatttattgctgcagtacgactgtctggccctgaatttgcatggcttgagaaggcacaccgtaagactaagtaggaaaaatccaagtaaggagtgtttctgagactttgatcacctgaactttctctagcaagtgtaagcagaatggagtgtggttccaagagatccatcaagacaatgggaatggcctgtgccataaaatgtgcttctcttcttcrggatgttgtttgctgtctgatctttgtagactgttcctgtttgctgggagcttctctgctgcttaaattgttcgtcctcccccactccctcctatcgttggtttgtctagaacactcagctgcttctttggtcatccttgttttctaactttatgaactccctctgtgtcactgtatgtgaaaggaaatgcaccaacaaccgwaaactgaacgtgttcttttgtgctcttttataacttgcattacatgttgtaagcatggtccgttctatacstttttctggtcataatgaacactcattttgttagcgagggtggtaaagtgaacaaaaaggggaagtatcaaactactgccatttcagtgagaaaatcctaggtgctactttataataagacatttgttaggccattcttgcattgatataaagaaatacctgagactgggtgatttatatgaaaagaggtttaattggctcacggctctgcaggctgtatgggaagcatggcggcatctgcttctggggacacctcaggagctttactcatggcagaaggcaaagcaaaggcaggcacttcaaacagtaaaagcaggagcgagagagaggtgccacactgaaacagccagatctcatgagaagtcactcactattgcaaggacagcatcaaagagatggtgctaaaccattcatgatgaactcacccccatgatccaatcacctcccaccaggctccacctcgaatactggggattaccattcagcatgagatttgggcaggaacacagacccaaaccataccacacacattatcatcgttaractttgtaaagtatttaaggtacatggaacacacgggaagtctggtagctcagcccatttctttattgcatctgttattcaccatgtaattcaggtaccacgtattccagggagcctttcttggccctcagtttgcagtatacacactttccaagtactcttgtagcatcctgtttgtatcatagcactggtcacattgccttacctaaatctgtttgacagtctgctcaacacgactgcaagctccatgagggcagggacatcatctcttccatctttgggtccttagtgcaatacctggcagctagccagtgctcagctaaatatttgttgactgaataaatgaatgcacaaccaaattattgataccaaatgttttttttgtgtacatttctacttctctagctataagtcttaattatacaacaaaatactatttttatatttatgtttggtaaattcaataactttcctcatcatttggaaagtcaaattgtttattgcttccctacagttttttctgaatctagcaggattttaaygatatcattataatttgacacaataaaaggacaacatgaaactgatgaatctttattgggttaatttcagacactatataatcttttaaaaatgtaacattcttttttatatataaataattggtggcatcacaaatagccaaagcagggtggagagagtgatccttcctgggtgcaggcaagaaggggatatgttttctacagagttttcaaaacagtgataaagctgtctacaagtcattgtgctttttatcatcactatgcccagacaatgtgaaacatcagagatgaagtgctcttcccacagaggtggactgatccttctccccactcccttggtgtgtctctgaatgcaatgttgtcttggaaaacagctttccaagcatttcactcctgagcacttgccagtttcctcacttgttcttcacatatccaggcaaagacatcctgtttgctatatgaagcattgtatcccgtataaaaggaaggaaagagagaaatatatttttacactcatcactcctcaggggctgtacaatcatgtagaaattgtttaatgtgcytgtcaaatagccaaagagtgttaaaccctgagttcccacccatgtgtgtggtatggttaggattcatccagatacacagagagaggcacaacaggaggagaaaggataggggtgtggggacagcgggcccccaatatggtgtaatcgtggcaggtctctgcctgaagtgctatgtggggtttttcttgttttaattttgactttaacccctgatttgtaagtttttcataaaataaacagaatcataactcatgtagatggctataagtgccgtagtgttctgtgggtctctggtgtctgccagtgataagtgtggcaccccaggaaggctgtggaccccatcaaggtgctatgtgagggccatgcttggggtggtggtgggcccagtagaccctgcagccatccatccagcctgcccacycacactgcccttgtgtactcctgctttgctacgttatcattgatcaatgtccctggttacctatgtgtttgaattatcttcrtgttacaggtgtttaatgattttgctccttctagcttatttgtatttcacctgtttttctttaaatcaacatggttacactctgtttcagcaactgtataaattaaacacaaattattactactgctattgagttgtcatgatgaattcttttttatttctgaaattatagcatttcttgaatttaagagaacaaaaacttgaaaggcctatgtctccattttattaactattactaaatacatatttgatgctcataataataatacacatttattcattatttcctatgtacaaggactcatctgcttattttacatttaactttctcatttattttctcaatacttcaaagtaaaagacaaagaaagttgaataacttgcgaaatactacagttatggagcaaggattcaaacacagccagcattttcctagctatatgtgtatacagaaagtaatgttttgtcatcacatacctgaattacttatacttttataaaataattcacacttacgaagacttcctctgatgtcttggatcaacttctttcctctacttggaagcgtccagccaatggcatggttacttcccagcaatccccacaggaagtacacattcctctgtgcatccagctggggwttttagagagagagtgacctggaaaggaatcctgttgaaatgatttacttacggagttttcattatttaacctgatgacagtaagctctttgtcaattttcactttttccccccaattttgtgtcacatcaccttgataattcttgattccatactgctggtcattgagagaactgataaactattagaggttgtggaggaattcgtgaatatgggccagtgatttttctaccttaaaactgggagcccatgcatggagacttaagacggaaaagaaccgtatcagcaaatctcatttgagattcttctcacattcatcagtgcatatgcatgttgcatctacattttgtgaagcaaggagtactaggaaaaatttctgggttggttgagtaatgttcaccatgagagaagtatgggctatgagtaggacctagaacttagtaatttgacttttgaattctttatcaaagacgctttagccacttaggtgactcttgcttcttctcctacctcccacactgctaagcccttagaggcaacaagtgtctcagacccgttgatgccttctccttaatgccctgacagcaccttgtccgttcctttctcattattgcatgagttacaaccctctgcatcttgcaacccaagtaccacactccattcttctctgagtgcccatagtttctttccacagaaacaaactttctgctaccatcagattaatctcttgggaaaaccactcaagtctccagtgctcctgtgaccttcagaataaggcaatctgccttagttggggtttcaagtctggacagaacctggccctgaccaaactttctaatcatatcttccaccaattccccaaactgggttattccayttcctcagaaaacacacttcctctctgcacttaggcttatggtattctctctgcccaggtgggcatttccttttttgcatctccctgaatcctactcatctttcagaggcctcctcctcctccaggaaggctccctttcccagtcctgcatggagcaagctctccttctaaactcctctgccagcaaaaatcatgcttttgcctcccatcttagttaagttgacaagtgtctctctgcctcttttgcctttgagaatgccctataatgcttagcctgatgtgttgtagaggctcaataaatgtgactgtcctggtacttaaagcagccatgaaaattcccagtgggtatatcttatgtgaaattcttgtactcccaagggaagccaacatccatgtatcagtttattatatcttgtttcagtagtaataataatctttttctttcttttgaatagttgatcatcatagcatctactgcataattgcagtatgtagtgtatttttaatgctaatcaatgtcctggttatcatcctaaaaatgttctggattgaggccactctgctctggagagacatagctaaaccttacaagactaggaatggtaagtggcaaataccaagtttttctcccaaagaaaaagtcccataataactgttggttacctgtctattaayctttmagtagctaggctgctaagcccagattccattttgcttgctaatctgttatcagtgagttgtgtttttggattttcttaaaggccattttccatcctgctatgtaaatcctcatggtcctgagatccatctcaacagctcacttttcttccccgataggattgctattcctactgagttcccaataacagaatctgccccaagcccagaaaggtgtaaatttcataatgtatcggtaagacattatgaagttaaacacagtagcaaaattgttcctgttttccagatgtgagcaggttagaaaggtccatcggaatgcatgtgtgttctacctgaaaccctgatctgtaaagtctaacccaggcacacaagcatgtgcatgaaaggagtcagttctgcctgctagatgcaaacttcatgcttacatttggaggcagatacatgttgcatttttcaaacagttgactgaagtaggagctcattgtttgatctgtggaaaattcagatcccttaaaaaattctatgcccttgctactattagctttaaattttttcacttccccaggggagtatggggaaaccaaagatgaaaccaaagtctattcagcacagaaggcccccttagtcatagattattaatcaaaattgatgagatggacaggttcttgtccacttttttgttatttagtctgtgacagtaaaaaggagaaacactttgggatgaagactgttatttcctgatagtgttttgtggcagtggtttgmcgtcaacatctcttgagtctagaatattttggaggatgacatacattcaccaacagccataaaacttggagaggaatgtcttcaaagagtccagtgagaatttttagaatcaagtaagaagttgtacttcttgttttcattttcagatggaaagctctatgatgcttatgttgtctacccacggaactacaaatccagtacagatggggccagtcgtgtagagcactttgttcaccagattctgcctgatgttcttgaaaataaatgtggctataccttatgcatttatgggagagatatgctacctggagaaggtaaagctattgacatacattagggacagaaattcatgcttattaaaggctgtgaactaggtggccttatccctgcattggataatgaattgcatttactaccacaggccttaagaccagaactttaaatatttatccagaagcagacacttatccttcaatcgyccctctcccatcattgtcctggtgatgagatcttcacagtaatgttggtggtgtgaattcagagttagaagtcctttgcttcaaggacttagcaaaccatcatccctactttattcccttggtcccccaccaggataactctgccacttcttaattctgtccataagatttgaaagaggacttaaaaattgatgarttttgttctggtagccataggcactagctgaaataccttaaaagtactcagagagtcttcatgactttctttatgttggtgaaacatttgcaaatttatattctcaccagaacaaaaagaactatagcttctgttccttaatattcctacccaattttatatacttttgacagttttatcacaactcctgtgtttgcagtagttatttttcccttcccttcatacatttatgtccagtacctrtggaccctccttgtgaactcttctctaatttctcacagaccaggaagggtttggaatataactggggctcagctatcaagggcctaagcataataaagtaaatgttcagttttacattttaaactcattttactaagaagaggaattcacatgcctatagatgtaaaggtatgaacaacaggtgactttggtttaccctggaatatctgggaatgctaatagcctcaataacggctcaagagacttgtgaaagatacaatttaggagaatctaatgcatttcttctctcaaggctctcttcttcccccattttcccactggccacccatgcaggtagaagtaatgagtaatgctctcaaacactcttttcatattacaaatgtactcaagaacctgcagggactcctgttgtttgtgagctcaacaatgtgccacatctggccacaagctcttcacctcttctttytcagtcyatccacctaagttctagttacacttctcctcagccaaacccagatgctagctctctcacactcaagcttgtgctgccttcaatgtgtgacaacatactaatctggaatggttttctacttccytctgtcaatgcatgtcctctgacctttcctcaaccaaaataaatgaaacccaacaacaccaaacttcactcttcacttaggaaagttcatgactgactaaggtactgtctatagtctcatgcaacttaycttgcatttgccccatcaaaatcctctctkcaccaccaytccatccagtggccctgggtggctgatcatcatggaatccattgcacccttgtcctctgctccaggctgggtttggccaatgggaggcactggcaggaggtcagagggtggtcatgtacctgcctctccacgtggggcttctggagcagctgtgcttctccttctgggagcacctcttctcagctggcctgcctcatgcatctgcaatccctcagacacccgtctgtgagaatatcttggattgttttattcacggttgtgctttctcctgttgcagtgaggactgggtatttcatgttctttctgagtccacccagagctaattggaatcaccatggygtctacgctgtataaayrccaaatgggaaaggggatctattgtcccttgagatttttctagtttggatcaaatcagtttctacaacagagattaatgggggtgaagtaaagtcaggacttactttcctagagactttggacaattttgaggggcaaagcttcctgagtttgtgmtttttaatatgtgagttaaaattttaagccattgaaaaacatataagcaaatattctaagaagataatatgtattctaagaagaatgaaccagaattctaagtctctaatgcaacaatagactaaatatctttacattcccatttacttggaaggactctgttttagttaagactaagctacctgggaaataaaaagaggacattggggctgatattctcacaaatgaaaggaacacaaagaacaaaacgggttctatatccacacatayytccacttctctgagtaagtgacttgatgtcagagaatctcacaccagattataacaataagacttttaartgttcaggatgtttatgtttaaagcattagactgataagaaatctgatctatttcttgtatgactagatgtagtcactrcagtggaaaccaacatacgaaagagcaggcggcacattttcatcctgacccctcagatcactcacaayaaggagtttgcctacgarcaggaggttgccctgcactgtgccctcatccagaacgacgccaaggtgatacttattgagatggaggctctgagcgagctggacatgctgcaggctgaggcgcttcaggactccctcmrgcatcttatgaaagtacaggggaccatcaagtggagggaggaccacattgccawtaaaaggtccctgaattcyaaattctggaagcacgtgaggtaccaaatgcctgtgccaagcaaaattcccagaaaggcctctagtttgaytccctyggctgcccagaagcaatagtgcctgctgtgatgtgcaaaggcatctgagtttgaagctttcctgacttctcctagctggcttatgcccctgcactgaagtgtgaggagcaggaatattaaagggattcaggcctcaggtttcatctggtaactttccttccatttccctgcttctgggtggatgcaaaatggccagaaatttttctcctcaatcctccaccatcctccagccaccattttcttcccttttcccttttgcttgcctgtcttcactgtggtgtgggatgttttcactactcttttttcctctctctctgtcttgctttgtttctcctcattcttgtcaataatctgaatagcaaactaatcattcgagagtagattttcacgtcacttgaagaacattctgattccctcaggcagaatgtcagttgtaaatcttgttcccaacatgccagattttctttattttctatatatatataatattttatatataatattatatataatattttatatataattttatatataaaatattatatataatattatatataatattttctatataaaatgtgtatataattatatataattatataaaatataatatagaatatctaataatgtataatatataacatataaaataatattatttaatatataatattttatatataatatttttatatataatataatatatattttatatataattattaattatataattaatatataatatatattttatacataattattaattatatataattaatatataatatatcttatacataattatcaattatatataattaatatataatatatattttatacataattattaattatatataattaatatataatatatcttatacataatatatataaatatattatatataatatatattatatataatattatatataatatatattatatatataaaatttatatataatattatatataatattatatattttatatacaatatgatatataatataatttatatattatatatatttatatataattattatataaattatataaatataaattatatatttatatataattattatataaatcattatataattattataattataatatataatataatataatattatatataatatatagtattctatataaataatataacatatattttatatagaatattatatataatataatatatattttatatagaatattatatataatataatatatattttatatagaatattttatatatataatattatatatatgtatttgagacagagtctcctatgaacatacttgtggacttatgattttattttgacacttaagagtggtcatagggtaggtgcatatttaactttcagagaaacttatacattgtttcgcaaactaattgtactactttacattcccaccagttgtgtatgagagctctgctgcttcattgcctcaccaataattggtgttgtcaagtttctttatattttaacaattttcacaggtgttagatgaagatcaccatggtcttaacttgaagttccccgactcatgatgatgagcccttttcatgttttcattggccattcgtatatattttttagtgaaggcaaaatattttgccttatttaaattgtatttctttttatattgttgatgtgtaggaattatttatgtattgtggatgcaagttctttgccagatagatgtaaagtgagaatatttccagggttatctattcatttttaagtgatgtctttgtttagtagacatttttaattttggtgatgtccaattaatcaatgtgtcccaaatggctatttttttttgtgtcctagctaagaatttttttttttgcctgtccaagagcatgatttatttatttattttttgcctgttcaagggtcttctctgtatttttatgaaatatttacggttctagcttttatgtttaggtccatggtctattgtgaattgatacttgtatatagaacaaggcaaggacaaagttcttttttctgctgctgcttcttctgtagaggtacccagctgttccagcaatgtttgtgaaagactgttttttccccactgaattgacatggtgctttgttaaaaaaatcaattgactagatatgtgtggatctattagtctactttctattttgtatgtttgtatgtttctgtgaatatcacattgccataattactattgccttattataaatcctcaagtcagtataagtctctcaactttgttcatctttgtcaagattgcccagacaggccgggcaggtggctcacccctgtaatttcaacactttgggaggctgaaatgggtggatcacctgaggtcgagagttcaaaaccagcctgaccaacacggagaaaccctgtctctactaaaaatacaaaagtagccaggcgtgatagtgcatgcctgtaatcccagctactcgggcggctgaggcaggagaatcgcttgaacccgggaggcggaggttgcagtgagccgagatcgcgtcattgcactcactccagcctgggcaagaagagcaaaactccgtctctgtccggacaatcctagattatttgcattttcatatgaattttagaaacagcttcttaatttctttgaaaaattttcctgggatttggattgaattgtattaaatatatagattctgtaatatatagagtctaaaaatatacagtgtggagaatagatgtcttaagtcttccaatccgtaaacgtggtatatccctttattacttagatgtttcatctctgttagcaatattttgtagttttcacaggagatatctcatatattatccaatgaatttatactttggtattttgatttttaaatgctatggtaaatggcatttttaacaaacttcacttttcaagtttccatctctaatatatagaattgctatttatttttatattccatgatcttgataaacttaatatttccagtagtttttttttttgtagatttcaaaagttggtctacatataattatgctctctgttaaaaccagtagttttaattctttcttctcaatctttatgctttctaattttatttttatttcttcacttgttgcaaagcagttgtcccaggtgggagccaaaatccttatctcattactaatcttaggaaaaagtaaaatgtttcactattatgaggtcacctgtaggtttcttatagatgttctttatcagattaagaaagatcatttctactctcggttttctgatcgttattaattcagaaagggtgttgaattttgccagatgcttttatttgcatttattgagataattacatatttttatttattatgtggtgaattatctaaattgggtaaaaagaattaaaatcattgtccaattgaacattttgcctgtcggctatgggtttcccttttccttttgttaaataacagttctgccacaaaataaaaatctagaaacacacattcccctttggcctccttaaaaaaaattaaaacttcaacaattgcacccctctctattacttccctatagtgaactcccatccttctgggaaagcaaaaagcctggggcgcatttgtgtacttgagacgcggagcccctctcaccttcggcatcccccggggacccctcttccaccctcagccctcccctcctcttcctctgaagagccgggcggccgctgcggccagcggtcctccctcctggcatcctctgctgtgaaccgcggcctgcagggtgcttgcgagcggcccgggcgcgcccccttccggccccgcaggtcacccggctacagcccgggttttcccgggacccgcgccgcgcggctgggcaggaagcgccagacgcctggggcccacgccgtccgcgggaaaagggcaaggcgctgggttttccagcagcaacctttggaccccgcgatccagtagctccggtaactccacgcggggcgtctgggtggaggagccggtcctggagcacggctgcgaggagcacccggaccggagggtccccagaccgggacctccgagtcagggaggattctacgccagggagcgccccagactgagagcgccccagaccgctacactcccggacccggagcttcgcccgaccgcgggcagtgcccacctgcagcctccaccggccggggttagcagccaggagctgccagacgcctgacattcttctttctgttcctactttttttccttcttcttctttttttttttttttgtagccctctctgggtgccttatctctttaatcacacctctctttcactttccacggtagtcaggaggcggagatcgctgcttctcacctactttctgaacttggcctccgcagtcgcgacctggcgtgaaggaggagctgccgcccccgccccagcctcggggacgcctctctgaaggtaagggtgggctccgctgccacccgcatcccctccccaccccccagaggaagggaagaccaccatccggggagggattctcaaaacaagatcaattaagagagagagagagatagtgtgtgtgtgaatacgtgtgaataattgatgagacagcatcctgtctttctctgaaagtatagttttagaaattaagacatccccaattattttctggagaggtgagaacgactgaaataaatgataacaatagttgtcattttttaagtgcttactgtgtgcctgacactgtagaaaatttttagatatcttattttcacttaatcctcctaagggccacatgaaataggaactattattatgctttaataaaagggaggaggaattccgtcatttacccaagagtatccagctactaagtagtagatcccagatccacacctacagtttttctgattccagagcctttgtcttttttctgcccagccttgggaagttaaaatgcccagcaccttgcatcgcagttatcagacaaattaatgaggtgtcaattgcagccagatacagagatccaagattattgtattcatttcactgacttcccttgcttcattctcaagaccctttgcaaatactgattttgtgtcatacacagtgctgctattgggagcacacctctcaacctcagggccttggatgggctaggaggggtaaatttggggaattgggtttgtgcaggttctggggacagtgttttccctctccctgcacaaatatacatccaaaggctgagaactaaggctaaggcctaggaatgtggattgaaaaggcagggtctaaatcccagcacttgggaggctgaggtgggcggatcatgaggtcaggagatcgagaccatcctggctaacatggtgaaaccccgtctctactaaaaatacagaaaattagccaggcatggtggcatgcatctgtaatcccagctactcgggaggctgaggcaggagaatcccttgaacctgggaggcagaggttgcagtgagcagagattgtgccactgcactccagcctgggcgacagagtgagactctatctcaaaaaaaaaaaagaaaaaaaagaaaaggcagggtccctgccttcagggacctcaccagagagtgggagctagtccaggagtgatggaaacacctgcagagtgatggagacgggcttggacataggcatgtgccatttggggctgttgcagttggagagcttccttgagaaggcaaatattgagccaagttgaaaggactctagggacctggcatctgggataagtggggagggtggcccaggtagcacaggcataggcagatttggggggaagcataaggctaacaacagacacttgtgtgacaaggactatgaggtggcattgattttcttggccttacagatgagaagccagattccacacaaattattttgtttgttagagtttaagcgtgtgtgtgtgtgtgtatgttatgccccaagatcattttctcctctttgcatttggttgttttatcatctcacaggctgagtaaaacgactatgcatggaacactgtagaagaaaaattatattaaaaaaaaactggtgttatgattttcatccagg

SEQ ID NO: 8778 - DNA, 158417 bp, Homo sapiens
  misc_feature (1)...(158417): n = A,T,C or G, or insertion/deletion polymorphism (see Tables 1-2)
actcaatcggcttcctacctcttgatacttagaggataaactgatacccaaagtaggtccatttttagggggaaaagtggagaaaaaatgagaaagcaggacaaatggctctttttttattccctgaaaaccaaaagcacttttgaacctttcaaatgtgtcttaaaccattaaaatcttaaaatgtaaatagtctaactcaaaactgttgaaattaccaagtgaaatctctctgaaattaaatgtcattattaatttcataggcgtttccaaactataaaaaataaaataaaatgttttcaaaaatagatgagtaaaaaaaaaaggagttatttcattcagtgcttttaaaagggtgttattatatttctttccattttaaaaaattacctagaggaaagctccacgttggtgtatcaagagaaaaattactaatttggctatattctccatggttttttttcttttctttctttctttttttttttttttttttttttttttggtgctatcgcacctctgtcccccaggctggagtgcagtggtgcgatcttggctcacagcaacttcccaggttcaagtgattctcctgcttcagcctcccaaatagctgggattacaggcacacaccaccacacccagctaatttttgtatttttagtagagagatggggtttcaccatgttggccagactgttcacaaactcctgacctcaagtgatccggccaccttggcctagtgctgggattataggcgtgagccactgcgcctggcctctcagtgggtttttcgaaccaatacatagctatattatattcttgacttgaatataatcaagattaatatttccattaaaatgtcccagaaatttttatttatttataggcaaccattcaaaatagaaatagaatgctgagtgaagcagagggatacagtatatgagaagatcaagcaattttaagttagaagaaaaggctgtaaatctggctttggtccttaagaccttgtaagagatgagcaagttattttgtgaagggcaacatcggaggaggcagaataaacagaggaggagaaaaggaccttaatgaaattcaaagtaaaattgggaggttgtgggtaaaatttcataactagacataaaaatcacaagtgggaacatgtcagagtcattcaaaaagtagatacatttgtggaagtgtgtgtgtgtgcatatgtgtatgtttaacctgcctggcatgttcaactggttatgatttttgaaattttaaattaagatcttctaaacctcctgggaatttataaggcttagagattgataaatggtgtctcagataaagagaaggagcaaatgtcagcgctatgatgatacacagctgctataaatgagtggcttgattgcttgacttcaaatacagcacactaactttcctaaactcagtctgcaaaatggtttacatgtcactattctcaatgcccagttttgccgaacactcggatgataatgaaaaagttttgctacaattttaaatttttcctttaagaagtagcataacactactataaaatatctgaggtctgtccagtgagaccagtttaaatatagctggagtaaaatggaaaacaattcagttatggtaaacttctatttctagacttgcactctcttcttaatataataaacatagtatgtaattataaacctgggaacaaagtcctctttattgaaagaaaagcaaatatgtatgcaaatctcaaatgagataatcaactaagcattaattgcaaaaaaaaaaaaaaaaaagaagtcccatgggaccatgggaccatgggaccaaacaccaatatttggaaggagtccttgtggtttggaaaaattgaaacgggcatagtctttcgtctctaggaaccccatatggatggcactgcctatgtgcaaagttgcagggtggggaccatgtgctgtttatcattttattccccgcacttagcagagggcctggcacaaaataagcactcaataaaatgtttgtggaaagaaagaattctacagctatagtttatacagtgtttttccaactttaaaagatatggcccacagtaaaaaccacattttataccaactcctggtacactcagatacacacacacatgcattacacaaaagttacgaagcagcactttctttaatacagtaggcatgttctgattatttctgtcctttttgcttgactaaaaaatactgattatgactgaataaattgatttcataacctactaaatcaagccttgcaatttgaaaaacagacatattatttcagtttacattacttaacctcttacatttatacacttcactacccataagtctccttaaaaaaaaaaatcacaaaatttttgatccagagggaatttagaaaatattcagctcaactctaaagttttgcaccacttacgaattcactgttgtggggttccccttagtcactgttgttgaattatgggaattttccgaccaaaaaaacagattggcccccatctcacatcatatacaaaatttaactcaacatgaatttaaaacctaaaggtaagaactaaacctataaaactcttaaaataaacattaggagcaaatttcatgactttgggttagtcactgacacgacaccaaaagaaaaaacaggtaaactggacttcatcaaaattaaaaactcaaatgacaacatcaagaaagtaaaaagaaccaagcatggtggcatctgcctgtaattccagctattcagaaggctgaggcaggaggatcacttgagccctaaagttcaagaccagcctaggcaacatagcaagacctcgtctttaaataaataaataaataataaataaataaataaataaataattattttaaaatgtaaaaagacaacttacagcctggaataatatattggcaaatcatgtatctgataagagactcggatatagactatataaataaataactctcacaactcaacaatagaaagaaaaataatccaatttaaaaacagggaaaggatttaagcagactttcttcaaaaaagataaatggccaatgaacacatgaaaagatgctcaacgggatagtcaccaaggcaatgcaaatcaaaaccatgagacaccggctcgggcaacatagtgagatcccatctctacaaaagaatacaaaaattagctggtgtggtggcatgcacctgttgtcccagccacttgggaggctgaggtgggaggattgctttagcccaggaattcgaggctgcagtgaactatgattgcaccactgcactccagcctgggtgagagagcaataccttgtctcaaaacaaacaaacaaacaaaaccccatgagatatcacttcataccctttaggttggctaaaataaaaaagactataacaagtgttgacaaggatgtggaaaaactggaaccctgacacattgctggtgggattgtaaaatggtgtgcccactttggaaaacagactggcagttcctcaaaaacaccgagttaccttatgatcctgcagttctgtccctaggtatatactcaagagaaataaaaatatatgtccacaagtaaccttgtacatgaatgctcacagcagcattattcataatagcccataaaagtagaaacaacctaaatattcatcaattcatgggatgaataaacaaaatgtggtatatgtgtataatggaatattgaccataaaaaggaatgaaatattaatataagctataacatggatgagcctcacaaatactatgctaagtgaaagaagaaagtcacaaaggacttcatattctatgattctatttatatgaattgtccagaataggtaaatctatagagaaagaatatctctatctagagttggtggaatgactgttaatggagagggggttcctttttggagtgatgaaaatgttctaagggtagatttggtgatgatggcacaactctgtcaataaactaaaactcattgaactgtacattttatttatttatttttgagatggagtcttgctctggggctgaagtgcagtggcgcaatctcggcttgtaacctctgcctcccagggtcaagcgattctactgcctcagccccccgagtagctgagattacaggcacgtgccaccacgcccagctaatttttgtatttcttagtagagatggagtttcaccatgttggccaggctggtcttgaactcccggcctcaagtgatccacctgcctcggcctcccaaagtgctgggattacaggcgtgagctgccatacccggcctgaattgtacattttacttctatggtatttacattttagattatattaattattcctcaataaagctgtgattttaaaaagcaggctaggcgcagtggctggtgcctataatcccagcactttggaaagctgaggcaggaggatcacttgagcccaggagtttcagactagtctaggcaacatgtcaagacacagtctctactaaacaattaaaattaaaaaaaaaaattagccaggcatggtggtgtgcacctgtagtcccagctacttgggagcctggggtgggaggattccttgagcccgggaagtcgaggctgaagtgagccgtgattgcgccacagcactccagcctgggcgacacagcaacaccctgtctcatggaagaaagaaagaaaagaaaggaagaaagaaaaaaaaaaagcagattggaactctggaattaacaagaagtaggacgcacggagcacttccgcctgagtggagactgtggatccgggtcaacctgactacctaaatcacaggccaataaatggtctttcagtggtcagtccctgtaagatccgtggctctcagcttcttatcttaggggctgtggaggaaggacatgattatgttgatttaagcgctgaatattttcccttgtgatacccatcctcgcaaaactttgcttcaaccacaaacgaggaccttctgtaccagaggggcaataaccacaatgaagctaggaagaaatgcagagcaccccagcatacagtccataagcttcctgaagtggggggcctcaggcatcgctgcctccccaaagaggatcaggcccagaacagtatgctccagaaataagactggaaaaagggaaagaggggcctcaagtccaggagaccagcggctttctgaacgcgcacctgccaacccactttggacaggtcacgatggacagcgtggcaggaaaagaaaaggtcactgtctacccaacacatgagaaactgtttctcgtgcctcacgtccccactccgtccccacccatgttgtctgagtccctcggtgtcagaaacactgctaagaaatttaagaaattctgttaatgagtttaagaaatgtttttaatgattaaaagtcagtgacttgtgaataaccatgtaacttacaaacgcaaggaactctgaaagtgtgcagcaccaccgatcagaagagaaaaccaagggacccgaaatatgctttaattaaattttcttttaaaatgtcactggaaagaacatcttgggaagacggcctggccgatcgccgtgtgaagggcaagccactctggccgagagggagccccacacctcggtctccccagaccggccctggccgggggcatccccctaaacttcggatccctcctcggaaatgggaccctctctgggccgcctcccagcggtggtggcgaggagcaaacgacaccaggtagctgccgcggggcagacagtggacgcgggaaagccggtggctcccgccgtgggccctactgtgcgcgggcggcggccgagcccgggccgctccctcccagtcgcgcgccgccgcccccgcccccgcccccgcccccgcccccacccccacccccacccccacccccagccggcgcccgcgcccgcccccgcgccgggcccggctcggcccgacccggctccgccgcgggcaggcggggcccagcgcactcggagcccgagcccgagccgcagccgccgcctggggcgcttgggtcggcctcgaggacaccggagaggggcgccacgccgccgtggccgcaggtcagagtacgggtgcccgcggcgctcgggaaccggctgctggctgggcggggagtgctcagggagggggcgcggagggctggggccgagggtctgggggctagggccgaggaaacgggaactgacggggtcccagacggatgagagctggggagaagggggtctcggctgaggggtccggggctgaggcagggtcatggtccggcaggacccggactgacgggtcgcgggcgggcggctcacgggtgaccgggtgaaggggtyttgggctgagggcacccgggctgagggtcgcgtctaccggagcgcgcactaggggcggagggcgcgggcacagagagccgcggccggtgccgactcgagtggacgcgagccggtgcgtcccggcttccaggacagcccccctcgggagagcgccgggtgggcgcggagccggggacacggggacctccgcgtccccggcggaggtgcgcaagcgtcgggagccgctccgggggaactttggagcagggtgtctggacccggggaagcgaagatccgcgtgcgtccgtcctgaggccgcgcggcacccctgctgaggaggaggtcccgttcgctgtccagagcccaggggcgaccgccgcktggggaccgggggaccgttcagcgaggggcgcgcttgtagctggccaggccctgtgccctgacgcgttgtgctggccctacgcccggcggaggggctggggacggggactgggtgcctccgtgcctccgcggatggagcgcgcagccaggacccccagccgcaccccggggggctggaaaggcgaagtcgctgctttgtgggctcctgcaagtgccaggcgctgaccactcctcctgggagcctaactgaggggggtagaggcagcaraggttaacagaaatctcaggtcccttggtggaaggtgggtgtgtagtcgtggtactttacgcctcggtgtttagggaggagcctaaggtaaggagtcagaaacggggagtaaccgagctgcggcttttatataaggtcagtggtaggtaaggaaggggccttwacctctgctggtgaccagaagcctgcatttctgcattctgcttaattccctttccttaggtgagttggctcactctcattgcattttgttggaatgtgttggtgataggtccgaaatttgcaaaattattgtattatccttatatcatttttttttgcagtgctcttgttttataagaagaatccaattcacttgggtcataggctaacggttgtaaaaatagtgtcattgttataaaagaaatcaagtcaaaaatagtcgtctgccatgaagaaactaaaatttttcttcttttccttgcaagattagggacaaaatgtaaagtttatttgtgtaaattatcatttggatataaaaccagacaatgataaactgagttgtataatacctattcctggaaaacctctgattttgaagtacattattttaaccccaactgtttctgtcattcgtgagacaaattgttaactggatttattaagagaacaatgaataacttaactctttaaaaggacctgggcaaatcttcgacaggtttcaggtattttatggcagtctttctgtctattgctaagtgatcgattgctgactgagaacagaaccaactgatggtgctagatgatttagaaaacctttctggtatagggactggcatggacattcactgtggcttttctcttaaagaaatacctttcactcctaggggagtttgacagaagacactcatagatgctaccagttagcatttggagtaatatatcaaaacattctgttcaagttttaaagtaagttttgtgtagtatattttcaatcagattcactttggaatcaaatacactttatttgattccaaataaagtgtatttgaatattcactttaatatacgaaactttaaaggtaatgtctcagccaaaaagtgaagtgtattacaaaactgtccatttttgtcttcttgtgtacttcacataatttttctccctgatttaaattatatgatatttgatagttaacttgctaataattatgtcttaagagatctttgaatcaactggtggccatctcagtcttttaaaactcacttgaaggaaaagagaaacactaatgatggttttttttaaaatcaaaaacttttttcatatttacaagtttgtttctagttcttaaacaataactgctgtaaaaccatggcatcagtgaggtataaagttttgtagaatcccaggctgaagactttttggatgtcgttttctcatttctttayattaaaaagaatataatttctttttaaaattaaaactaaaatgtccaccggcctcatattctttattgaacttaagtgctttgaaaatatttttgcgattgatatttttaatgataaaatataatattttctttgaaggactagtttcctaaatgttcatttttttgtatgtttcagaactacttttaaaaaaattctagattatgctttaaattgcaatatttctaaattcctatgacatttaaaatgtgtacaagagaaaaggtgtgacatgaggaatatgaattagaagtggattactaatggtcgtagtgaattgtttttaatcagtgttatataaatataaacaaatacttttttcttctgtaattttctgacaataaggatgttagccactaaccttaattatcaagataattatgtgcatgaaagctgtgtaaaaggcacaaccgtggaacatatacaagtattartaatacatttcatttagttttcaggttataaaatcgttattaataacaagaggctttcatgaagtaggaaaatatgttaaaatgacattttctgaatgtttcacacattctggcccacactttcacttctttcctagcatctatatattcccaatgcataggacagagttggtcattctaattgtgggtgtctttctgctggattcgttgtcacttggacttggaaatacagtatgtcattaggtgtggcaaatgtactggaagaagtttttggtctcataggattccactaaataaatattagctgtagaggatttttaaaaactcactaatagagaaaacttggtgaagtcactagtgtgtaagcgtaaacatatgcaccccccacaactgaatttctaatttgcttatttttcctggtagatctccactttgcttactctctcttaatatcccaaagcaacaaaaagcgcagtgattttaattgcttacaaaggtcctttgaaacggatctaatttgactccacaaaagaatagtaagagttgtgaacaaccatcttgcaagtgtagatatccccagcgtatcaacttcagttagtttcatagcgttctaaatcaaaaatttagatttaagattatttgaaatcttcttggaagttcttacttactgtttgcgttttctcaaaatacagaggtagattgggggagtaatatagtatatgttttaaagctgttatttaactaaaatgtcatgttttaaattttatttaatgcacttaaagtaggttcttgggataaaatctattcagatgcaataggccatgttttggggaaaacttttgtagatgtttagataatatctgtcatcaataatagtatatgtttaaattattttgtaaaaacagatttacatatttttaaaatttctcttcaacaataagtacacatcaatattttaatgccgagaatttcattcagagtatgactgtttacattttcaactgtttcaattattatggcttaggcaagtaccttatcctttctctcaattttgtcatctttgaaacggagaaagtgttgcagttattattgcttgctcttttgctatgattttaaggctttatgagcaaacccatgtactttaaatgatgtgaccatgaccctgaatttaattgagctgatattctgaaaagaaccttcatgaatatctatgtcatagctaactcttttaccaatgttaatagttcactgtagttcaaacctcaataactttgagattgttaagattgaagatgatgcttctcatgtggtgatcaatttataaactgtttctgggaatattttattatcattcaatttaaaattgtattttccattccctgatgactttggacaaaaatcagcatagtaattatttttattccagctttgcgagtcctgtgtagcccctcttatgttaatattatacatccgatgcatctagaaggcacagattgtgcgctttgatttgataaagctctagtctttgcatatctttatggcacaccttgtgaattcttaacgtatattccccaggagcaagttcgttttataatgaggcctaggatccatcagatcagaagacagtttagtgtcacaacttaaaagactaaatagtgacttgtgcttgtcattaaaaatgggtctctttcaacaagcactcaccaaaaaatagtgttttagtggcttgaaaggttcagatatctcctaataacccacctatttgctagtagggagtaagtggaaaaacatataattaactgtgcaccatccaaataataaattttaaattcttcgcgtgaattgttgatacatattgttgtgaagtgtctcctgcttaagaaagtaagggacttggactgaatatgccaaagaggaggcctctgcaagcggtgtcttggtgatgggaagttactggtaacagcacacggggtgatggggtgaagaggcttgtgtgcgtgggccccgggggctgaggattgtyggagaggacttctcccaccytctctgggccccaaactgcacactggactggcaagccactctgcccactgcagtgtggagctayaaagcccaagtagggacttcactaaaaggatgcagaggcgaaggcaaagaaaggctcatgctggtgcgtgtaggtgggctgagtgtccctgtccgggagtggggagccgtgttatcttccactgccttaatcctacagygtaggctttctcagagtcattgccataccttcaactgttccagtggccaggctgttctcaacttgaaaatcttttgtgggacagtgccatgaattttttttcctactgcgattttttagatataaaggaattgaatccattaagtggagattttaaaccctccagtcaggatttaaactagattgtgtaagttcagttcagttggattcaatatctgtttaggaagcatttttattccacttcattgattttagaaaataaattcattgcttggttttaactatgtcactattaaaaaaaaaccactttaatttgtggactcatctgggaggattatgtgtggatatgacatattgagtcagattatctgaccttctgagaagagttcagattagcaaaaacgtggggtgagaagtccttcgcagtttgccacagrtaaggagaaggtagatatgagggaggtagagaaatagggaaataccctgagtaggaatgtaccaggtctgtatatgctcaactcccacartcagcaggttgcatgattactgtgtatagtcttaaaatataaggttgatttctaagaatttaccctgcttcttggtgacattgtaggacatctcagtttgccacttagcactgttaytctttctggctctrtactaaaggagataatttgggcaagggaatggaaagaggttactttttcatcctgtatgtttaaggaataaattttccttcatatcgagggcagtggagaaatataactgtcaaactgttcgagtgcaatgatgaagttccggaaggaacttcctaaccttgaccacacccctctggctgtcatacacctcttaaaatgtctttgaatttgaatgtctttgaattgaaatttaaaatgtctttgaatttgaaagctttgggtctacttttaaaatgccaaagttcctggcagggttagttcactaaaccactatcagcaaaaatgtgaaaggctagttgcttgtttccttgctacctgaaaacaaggcctttaaggagtagaaaacagatttggagtttgaaagagggggttaggagagggaaaaataaagttawtgcatgtcccagtttcctcataagccagaaactttgaaacaaaataggaaaataaccatttggaatagcagtgataggaaaagatatatttacccatcattttttttctcttagtcaagacaagtcgcagatcttccttgaaccatttttgacctcaaaacagttattmtgaaacatcaattaaactaagaaatgtaatcacagttcaagttatgagctagtattatcttaatgtaattaaatatctgaatattatcacttcattatatcttgtatttcctctgtgatgttagacaaattatgtggtctcttcatgagtcaactcttccaggctttaaaagtagcttcctaatagattgaaatgagaggaacttttcaatcacttcagaaaatgatgtgccaaggtagtataaataatgcttaatcctttggcagatccacagatcataaaatatcatacatgcggccagtcgcagtggctcacgcctgtaatcccagcactttgggagacagaggcagaaggatcacctgaggtcaggagtttgagaccaacctaaccaacatggagaaaccccacctctactaaaaatacaaattagctcggcatggtggcacgtgcctttaatcccagctactcaggtggctgaggcaggagaatcggttgaacccgggaggcagaggttgcagtgagccgagatcacgctattgcactccagcctgggcaacaagagtgaaactctgtctcgaaatartaataattattattatacatacttaattttatttttgctgaaaatagtatggcaagccagtgcatctctgttagaaatagaaacttagtagccacctcaaaagcaagrtcataattctgtgaatcagctaataggtggtatttagcagttaggtatgggctaccctcgtgcctcatgactaatcacattgcttactcgtcatgcattttttacaaagtcttgctaaagtctgtgaatctaaaacagagaatctcaaagtgttccttactgaatgttatcctttccgtcagttgataattacctgtgtaaacaagcttttgactgcatctagaaaagcacctatataaattcttctgttttatatggtggataaagtttataaaggagaacaaacataagaatgatgtcaatataaatgaagtagaaacttcaaaaatcatttgcatatgtcaagtataatccagaagagtgaagaaaatacccaggcatttggcaatataggattactacatgttttcctaaagaatttggaactgattagaaacatcctgattttatttaaaagcaatataatgtatttttacagtttgttttcaagaaggttcaaaaaaaaatttttttttttttttgagatggagtttcgctcttgttgcccaggttggagtgcaatggcgccatcttggctcactgcaacctccgcctcccaggttcaagtgattctcctgcctcagcctcccgagtagctgggattacaggcgcccascaccacacctggctaattttttgcatttttattagagacggggtttcaccatgttggccagtctggtctcgaactcctgacctcaggagatccacctgcctcggcctcccaaagtgctgggattataggtgtgagccaccgtgcctggcaaagaaggctcaaatttrgtgacttttaggactagagcagtttgatgtctgcaaaaatctagacaccaatttcttgaaggcaggtactgactgaattctattccagcatatagcacaattcttagtaggcacttaaatgttttagaaagaagaaagagctggtcatggtggcacacacctgtaatcccagcactttgggcagctgaggtaggcagatcacttgaggccaggagtttgagaccagcctggccaacgtggcagaaccccgtctctacaataaatacaaaaattaactgggcgtggtggcacacacctgtaatcccagctactcgggtgactgagacaggagaatcacttgaacccggtaggtggaggttgcagtgagccgagaagattgtgccactgcactctagcctgggcaacagagcaacactttgtctcaaaaaaaaaaaaaaaaaaaaaaaaagaataaagaattagtctaaggcagtggttcttaaaatgtggtcctgggatcgtgagcatcctctggcagcttgttagaaatgcagtttcttggaccycatcccagacctgtggtgggcctagcaatctgtgttttagggactctgctttatacgctgtttgggaactcttggtccaagatgattcttgcaccccacctgatagagtggggcccatttgtcagtgtgctttggatgatttctagtaagccttacccttgcttatggttaagttctttgccctatctctctccactcataggatctcttggaaccatcctataaaactacccccattgrcctatcatttattacttagaaaagctcagtagtggtgtcaataagcttttgtcaagaggctagccggctcactaattagaccttgcaacactggttckttttagcttagcatggctgcttaggaatccctagtctccgcgtcaaagactacaacttcaaagactggattttataaaatcacagaagatgatcggccctagaggactggttcatgttaaacagatttacaagatatggatttgtaaacctcaattccagtttaataatagtagaaaatattcccttcctagtgattgttgataatagttttttttattttaaaattmtataatttmaaggattgaagagatttacactcatatatatctgatgtcactaagatttagttcaggttacttagaaagcattgggcaatgttttgtaacttttgggactttttccaaagggctggagaatataggaaaagccgtatacacgaagagtttcataaaagcattgttataagaacccatatttggaagtaacttaaatatccaacagtagggagatgtttaaataaattatggtataatcaatagttaaaatattgtacagttataatgacaatttagaaactactcrcaactctgaagaatatttaaaaagtaggataaaaaatgtgtgtgaactattgattggaaccttacaaaaatgtatgtatatgaaaaagtctggaagagaatatacaaaagtgrtaatagttatgttacagtagtgagatatggagggctttttgtttgtttttatatttttctctctttcccaaagtttattcagtagtataaaattacttctataatcaaaagcatacatttatagcttttttttctttttggtgtgtctgtgcttctgatagtaaagatcaaggcaatatatgatttttttcctattatacccaaaatttattttatactaaattttatttcacatattggacttccctgtacattttacttgcctagtctctatttggcatggggaaagaaacccatctctgttatggcctcttaatgttctcagccatacgtaaggtttaattttgttgatttgtttgggtccgtgatctacttgatctttagcatatgctggcaaatagagcttttaaaaaatagtttccagagttactttcttttaaagcccttctctctttatttttttctaatttttttctattatgttcctttttttctaaaattgaatgacctcatgatagagttacccagttttcctgctgctgacagaatgttgcacttataaatagcagctgatgcagatgcacagaaaggtaaatttctgttacaaatgttcattatgagcccttcatataatttgtgataataattttaaaaataaaaagaaatgggccgggcgcggtggctcacgcctgtaatcccagcactttgggaggccgaggcgggcggatcacgaggtcaggagatcgagaccatcccggctaaaacggtgaaaccccgtctctactaaaaatacaaaaaattagccgggcgtagtggcgggcgcctgtagtcccagctacttgggaggctgaggcaggagaatggcgtgaacccgggaggcagagcttgcagtgagccgagatcccgccactgcactccagcctgggcgacagagcgagactctgtctcaaaaaaaaaaaaaaaaaaaaaaaaaaaaagaaatgtaaaatagcaagcgagtagaggtttcccaaaatcagtgtgaacattgtgaaagttatatatatgtatagacacacacacacacacacacacagtaatagcctttgaatgaattcttttttcatcttttctgttgcattgtcctagaaatcccaaaggagaaagttaagtggttttgcctttgacagcggttacagattacatttttcttgtcactttctttgggacttcttttgtgaaacttgtggcatgtcctagaataatctttatcttaaagttttaaaaactttttagaaatttcatatcagtgttataaatatttattctgtatgcctccccagtttgggatgatttcatccttaatgataagccaagacaaacttcagctaacaatatttagtttatagatcttagaatgtgtttatgggtaaaagaacctcgatgtgatgataccttagagaatagatctactgagactgatgcgttttattttcatttttgtattttatttatttatttattgagacagggtctcactctgtcacccaggctggagtgcagtggtgccatcatggctcactgcagcctcaacttcttgggtttaagtgatcctcccacctcagcctcccaagtagctgggactacaggtgtgagccactacacccagctaatttttatattttttgtagaaacaggggttcrccgtattgccaggctggtcttgaactcgtaggcccaagcagtcctctggcctctgcctcccaaagtgctgggattataggtgtgagccacgcgcccagcctgaagctttttttaaatgaagatttattcaacaaatgtctattgagccmcttatttgtgccacaagctgtttcagataaggaggataaagcaatgaacagacaaattccattcctccttgagtttacaattattgttatctagatttaacgagaacatttttcaatgggaatgacggtgactaagagggggtgaatgggcctgtgtcttgtaactagatggcattgctaggcaccgtggactcagggggctctctctgagattggtatagtgtatgggaaagaaaatctgtatccttgaatattttttcccagctctcttactatcctattatcttaggttatgttgcatgtattctatattgtatattatgcataatatatttataatttctgtctcagtaatgaagtgatttcagaggaggtaagaatgaatcctttgctaataagttattactttccttgaaaatccaaatgacaagaggattattcactttgcaaaaggattatttatttttataatgttttcacagtagatttaagtggttaactattcaagtgaatttaatttataaataaatcaattaatttaaaaaaattatttaaccctaagaaaatgtaaaacaaagttcatggagactgtcccattaacatcaaaaaaactttttttcttgggagataaagttggctactttctctttaaaaggccattacaaacttttacaagcttagaatataatatttgcgtaaaaggagacccagatcctattttaaaygaccaaattattttgatcaaattacttactatagctattttcaatgtctgtattcacaaactgtttactatttcagttctgttttcaagttgacagaaaatatcatattgaccacttagaaataaattctgaaccacatgaattttttgggaaaaaatgataaggaaaatcaattttgatggactttatataaagttaaatagaattaattctttcatatatacagggccgtgaaatgttacagtgtaactcaatacagatgtaaccaaaaccttcaaattttgcaaatttcaccagagttaatttgtttggttctacaaacatttaccaaatgaccactcattaaacctgcccacctatgaacatgaccttataaaatggtgagacatagcagtatctggcactgggcacacagattaccacrgctcaataaaagctgagaaaatgactcagtgattgaacacagcgcattgccatggttgtgtctttaagccattcatgtaattcatgctgtgtattcgacttagcctgctgtatgatctttgatcctaaccaagcacaatacagccacagttaatttctttttatcgtgaacattaaatttttaaatgtcaggttgactttctttgtcctataacttgtgtatgaaatatttatcctggtcccagcttttttttttttcattctcaaaggaggtgaaaccagcttttgaattcagaaaatgcagactaatattaatatcagccaaagtaaaacataattagaaggcagatctactctgaaatggaatctgatatattccatgttctgtgttacacatatttgctgattatttgatgtcatgtctgataattttcatgggaaaattccatgtaccaagcaaaattgttagttcctagagggtaagaatgtgtatagtagttctcattctctttaccttgctgtgcactgtataccttccctaattcccagccaaactgggtgcactatatacactttttaatacttttcaacttgattttattttgaggacaagtgtgtgctttttcagtatcacttgtataggattctccacaatcttagggaatttcctaaactactctttaaaatattaattcctattttatgtattgtttttgtgatacataatgatatgaaactaatgccaggagaaatttccatkttgttattctaaagcagacaaaatgggatatgaaagggaaaaatgttaattatagacttcaacattctatgttggacctcgtagttgttctggtcagaagaacaggttttttaatggcctaagggccagagcattgttttgcattcttgtttggagactttcaatggcaactgtaacaaactctgcttagtaccacagttggagaaaggtttacaataatgcccagtacaaaatgttattcagacttactactcatgcataaaataaaactkgttctcttcttaaacttcgttacatattagataaaacactatcaagttttggcctcatttgttcataatatgtaatttaattcagttgctcagctagttcatatatgaatcacaagtattatcatcacaattatttaacagttaatctccttttatagggtagatatgtgttaataagcaacttcaaaataccaaagaaactgctttacatatacaagcaaagcaaatagatggaccttgtgacatctctggacaaccagtcttcttggtaggccttcatctgtgggtgtagaacgaaggtaggagtctgctcactaaagatcaatgcaaggaacttccatgctctccactgctgggcaacctgccattctcctcctgccaccacacctgttcagctactagggcaaagaagtgccctgctagacacaagcagatgcttctcttaccaagagaagataatataaggaaggataaagaactgaaacaggtttgaggctttctcttattcatcatctagacttcagttttcttgatttattattccttcatgtcttgccagacacaacagttgcacatgtgttcaagttggttctaggcacaaagggagataccagagcttctgtagctacgagattatcatctgcgtgagccaagaaggggtagtgttgaaacaggtaactaacaattcacagcagtatgtgattaagggctaaaataagtaaagggagagaacaaatgctacagaaattcagagaaggctaagatcagtgtggagtggagggtacagccaggtaaagccttgtagagaaagtgggaattgaactaaactttggaagctcagggattgacaggatagcctcacgaaaaatactaaaaacaatacagaagaagaaacaagaagggaattaaaggatgattccatttgtacaaaatatcccgagtaggtacatccatagagataggaagcagatgagttgccaggggctgaagagaaaggaaagggggagtgactgcttaatgggtacaggatttcctttggaggtgatgaacatgttttggaactacacagaagtgatgattgcacagctttaagaattactaaataccattggattgtacacacttcataaatacattttaaattgtgaattttacctcaaattaagaaaaaaaaagttcctggtttgaggtaaccaaaagagaaaataatttccagtataagaaaacaaagcctggaatagcaaataagcatagagttaagggaaggtttgcagagattaaccagtttgaagtggagagtgcgtggatgtgagtagtgagaaacatggttggaagtgtagattttaggccagatgataaaaggtctggaatgcaggagaaggagtgtgggttttatctcaggagcggggagattccatatcgtaagaagaggggtgagatgattgaatcagaagattaatttggcagtagcatgcagggaaagcagtcaggaggctgctgcaaaatccggacataccatgaggagggcctgtaagagtgaagtggaagggcagatgtggacgatgctctgaagcagagartgatgctcaaagtgtggtccgtggcttgatgctgccccacaagtgttagttacagacctggcacacagtaagggtagatttgagggtaagtctttaaaactttaatattattatgatattcaagcgcatgattttgcatttcatagcaatatccacagtaggtgtaagagacaagaaaacttccttcatgccagrgttagaagaccgctgccctaaaggatgaatgagtggagttgatgactgactcctgtagggcagtctttttttttttggagatggagtctcactstgtcacccaggctagagtgcagtggcacgatcttgactcactgaaacctccgcttcctgggttcaagcgattctcctgccttaccctcctgagtagctgggattacaggcatgcaccaccacacccrgctagtttttaaaagtatttttagtagagatggggtttcgccatattagctaggctggtttcgaactcctgacctcaagtgatctgcccgcctcagcctcccaaagtgctgggattacaggtgtgagccactgtgcctggccaggcagtcatgttttatggctcctttacagtgttccaccccttgtgctagacactgggaccagagcagtaggcaagatggactggcactttcccttgtggagctcgctgtcacataaatagtccttctttgtcaaaggattgctaggaattaaagggaggtctggttcagctcagcataaggaaagcattctaataactacagctgtcccatagtgggaaaggatgatttgtgagaaagtgagtgcttcgtcattggacatattcatgcagagtctgaatcatctctcaagaagtcttgctttggtgggagaaatggagtgggtgacttatcaggtcttgtgtaactaaggtgccatgattccctattctctaatgtgaacttagtagaacatattttcttcataactggctgtattggaacaccagtacatatactaagtttctgtctgtttctattagcacttggaattacagttacctaaatttacatgtagattcaattttgaacttatctgtacagttagttccacaattctttttaaagcaagtactattctctaatgccttctcagacattcacttatttccaactttaatatttatagtaagttcctctttcacgtgatgtgtgtcacaagtcacgcaaatttctgcagaagtgagttacataaattgcagtcaagctgctgacctgtaaatcattcattcttgcccccgtgatgtcatattggggttgaataagaccaggcgtgactacccacttgaggatgtctttgggatgccattttaattgggtgaaataacttttattattcaacttatgtgaccagttactgcaaacgtcaaactgttacgtttaacagctagaatgatcataggttaattgcactttagaggatgtggaggacgtagactcctataggagtgatagccttactatattttgggggaaattctagaatgtttttaactcaaaggacattattttcatgaggatgattttaatgcttatggtatcaggtgaagaaaaatgttagctgcagaagaaaaaaatttgtttcacttcaagtctagtagaatattttgttaaaatagccaattttcattatgtattattaaaacaggttatacttttcattaagatgtatgtaaaaatttcacatgtgcctggtattacacagtatttacccaataaatatttattgaatattgttgaatgaatgtgaggtgagggcggagaaaatatttcaaatggaaaaatagtatgagcaaaggaaaacgtgaatacagaaagaagcaaagatagtttctttaaagtcgcatttatatgtaataacaatgggaaaactttttggctgagtaattttggtggctccttaatttcttaatatttaacaactaatgacgactctctctgatactgatatccaaagcaaatagctgaccttgaacatggaaaagttactgcctctgactaattggaatgtctgagcctttcttgtcttctatcttctttccttcctttcttcctctctttcctcctcttttcccctcaattgtagcactagctcttgttcttgttccctctacccttctcccctttttcgttcctggtgttccctatgttttcttctttccttcttttctgtctctgtttctctccctctgaatttctgcttcctttcctctctttcccarttgctactgtctctgcctttggttgtctctgagtgtaatmtggaagtgaagtatatttttatctactaaacacatgatcaaatagggattttttattctgaatttaacattaacagaaatgttatgttgctctttatgagacgaaataaarttggatgtcacttataaatggattttgattgatttttttaaagtattgactcactaatcttyaaattggtagaaggaggtcagtagactttgactcataaatttttgtaagcrtaatggcttgttgaataactcctaattgtctttaacaaccttggtttctgtcctcttttttccaaatgcagatatagcagatgtcttcagcatctaattttttattacactttcatatgtgcagtcatacaagagctggagtatttgttttgttaattctgtatctttattgtctagaacactgctaacaaatagcagatgctcaacaaataattgttgcttaatatttcaaatctgtagtgtcattctacctcctaatcccaaatagccatcataactttttagactaacattactcattaaggtaacttagtatacaatgaatttataaatgtaaccatacaatttcatgcttagagaacgttttctctccattctctctacctttagaccattctgcagtttaaatcttgaaccaaaatgtcatttaaccatccttctgaacgataactccataattaactcaagcaccaaataagtcatctagctcttgatggtaataattaatatttgttgaatgcttattctatatcaggctctgttttaagcacattatatacattatctcattttattctttcagcagctatgtacaccagcagtcccccacctttttggcaccagggactggtttcatggaagacagtttttcaacagactggtggcaggtggaaatggtttcaggatgaaactgttccaccttagatcatcaggcattagttagattctcataagaagcatgcaacatagatccctcacatgcacagttcacaatagggtttgcactcctttgagaatctaaggctgctactgatctgacaggaggcggagctcaggcaataatgttcgctcgcccaccactcatctcctgccacgtggcccagttcctaacaggccatggactgctactgcttcacggccttggggtgggggactcctaatatacagtattaaagtcagatgaagaaacaggaacagagaggtaaaataacctgccaggtgataaaaactaggatttgaacccagacaatctgaacccagccaccctgtcatgcacaggagcctactttgcaagtatttggccttccagggaatgagatgtccacatcccatcaccaccgccaccactattccacatttaacaattagacctatacaggtgtaaccatattcacatgtaacagtggattaaatttaaacttttagttgtgttaattcactgcaaatcagcttatgtgtcttgtaagtagtaagcaacttgaaagtacctgttgttgcttatgacaagataaattagatcaccaaatctttatatttagtaacttcatcatcacttagaaatcaaccgctgggccgggcgcggtggctcacgcctgtaatcccccagcactttgggaggccgaggctggtggatcacgaggtcaggagatcgagaccatcctggctaacacggtgtaaccccatctctactaaaaatacaaaaaattagccgggcgtggtggtgggcgcctgtagtcccagccattagggaggctgaggcaggagaatggcgtgaacccgggaggcagagattgcagtgagccgagatcgcgccactgcactccagcctgggcgacagwgcaagactccgtctcaaaaaaaaaaaaaaaaaaaatcaaccgctgttaggaaattctttttttttttttgtctctcttaaattcctcttaatctaaataaagacattttattttgtctcaggatacagaggtcaattgaatatagcaaattttgtcagtgttgtaaaaaatctggagaggaatgtaaacggctcatcttgtgtctggcctctaattgaatcagtcagctatggtggggttaggggacagatccgtgtatttacttgcataggacaaaaattagtcatttgtgagtgttcacatacttccacctctcccaacccaccaaagagaattgtaatttgacagtacaataatcccttcccctactcttaaaaaagttgatcttacaaggtcagtcctatgtttttatgaaaaagaattagagaatgagtagaaaggaactagtcaagaaaagcagaagatttgggttgatagacataaagtgctgggaatgagaggaagagagagagatcgtgaaattcctgggctgggaataaagactgtgtgtaggtaggacagcctttggtgaaggagacactttggagagcatggtgtgtgaaaacacttaaaggaaaattaaagggaattaagaggaaattgaagggaaggagtatatgagaagggttgctttgtggttataagctgaattttctttaatgtattttgaaagaccccggtaaagaaaggaatttcttttaattttgcagagaatgaggagttgtccaattaggtgttgaattgttcttccttggaactctcaagagaggagttgtgtttagagatagatttgggagctgtaagcaagtagatgtgttatgagtcacagtgctgagggcaagaatataaagaagagatgaaggccaagaggaaacttagagaacacaaaatagaaaagctcagaaagcaggggtaccaggaaaagggactaaaatagtcatcataaggtaggataataggaggccgtgcacagtgactcacacctgtaatcccagcactttgggaggccaaggcgggttagagatcagcatggacaacataaggagatctcgcctctacaaaaaaatgaaaaattagccaggtgtgatggcgcacacatgtagtcccagctacttgggaggccgaggtgagagcatcacttgagcctgggtggttgaggctacagtgaaccatgatcacaccactgtactctaacctggatgacagagcaagaccctgtctcaaaaaaaaaaaaaaaaaaaaaaaaaaagggagaaactgatttcaaggagccaagaaaagagacagattcaatagtggaggaygggcaaaatatcaaatgctgcagaggcagagaccgtggtgtgctggagccacattgttaaattttcacaattttattgagccaatcgttatgcatgctattattaaaacttaaattgaatacagttaaacaaattatattaaaaataaaagtaataaatacacaaagcataccacttccttattactttacattgctgagatgattcatgcccatggtatctgagtagtggaaatacactgtaatatttgtgctgcttttaaatcagtcatggtgggagtatttacaccacaaaaattggcaaacactaccaatcagggcatttttctctgcaaagagagccagttaaatatttaccagcatgccactgagaaaatagaattgaagtcaagaaaagtctaatggatttagcaagaaggagatgacatatacttaagtttcagtagaaaggtaggtgacaaaaaccacagtaaagtgggttgaggagtgaaataataaaaaattaaaaacatgtgttcaagtaagtttgagaaccattgaattaaaccgagaagcagattgttattgttgatgatggttttgttttttaaattacaaggtttgcagagtacatactatgctaatgtactttattaatctccaaaaatgaagaccatatgcaaatttattttatggtagaaccttttctgttggaaaatcttagggaacaagttatctatagaatacattttgggaaatgctgctcttgtatttcacaattaagatgatactgattgtaaagtttgagattaatattcttgtttttaaagtttcatgctttttaaaagaaattttgtcaagaatggatgttgaattttactgagtactgtttttgtcgtttttgtagtaatcatacggttttttgacctagtgctgtgacacattttaatagattttcaaatattaaatcctctttgcctttctgagataaatgtaacttgattatggtggttcattattttaatagaggatttaatttgttaattarcattttatttattatttaaaatcaatattgataagtgggactgatatttttctctgttgtcaggttttaatatcagtgttatgacactccagaaaagttaattatgtcactatattttttcctactgagaaacagcttatgtagtaagaaaatcatctcttccttgaaagctttaaaaaatcaactataaaactaatagcttttggaggaagtaattctttgataagttttcaattatttccatygttaattatttttctgtatcttaagtcracttcaccatttatttcatttcagacaagttagtctgagtaaactgcccttggcctgccttattatttacttaggttctggtaaaaatcccatcccagatgtaaaatcattgtgtgagtagagatgaacagcccctgtctaacgtgggctgtgtttaagtgtgaggcaattgtctgctgtcttcacagcccagttctctggcttctagggatgatgggtagggtgtttataatcgaatgaatataaactaatcttgagttaaatgaccagatggcagaggtgaaagaacggcaatccktggtgtctactccccccagaatggatcttgtctctgccctactgtgtttcacrtctggggaygattccttctaagatacagtgcagttctgaatgggttcagaaggaagaggactggtagcaggagggggtctgggggaaaggttacctaaatctgcctgactctgacagtagtaagaaccagccaagtgttctgtttgatccgacacttggggctacacactaagaatagataccagtttctagaaatctttactttttgcccatctacttctgaagaaatacctatgtatttcaaaggaaaattggcacaagtatcaaggaaagctggtacaacttaatcttaacctggaatcaactcctttaatttttacatacagatttggttccgttttttagattaaaatttttacctttgttttcacgtatttgagccctttttttttttttttttttttttgagacagagtctcgctctgtcgcccaggctggagtgcagtggcgggatctcggctcactgcaagctccgcctcctgggttcacgccattctcctgcctcagcctcccaagtagctgggactacaggcgcccgccactacgcccggctaattttttgtatttttagtagagacggggtttcaccattttagccgggatggtctcgatctccagacctcgtgatccgcccgcctcggcctcccaaagtgctgggattacaggcgtgagccaccgtgcccggccgagccctttttaatagttgccttaaatgtaaaaaaaaaaaaaaaaaaaaaaaaaaaaaaaaacccaagtggtaatctgtcatagataaagtgtttctcatctctcatgtgttttgcctgttgtgtgtaatgagcggtttcgctgtgggtgctcctttcatttctggctaacacattagagtgtgtttatgtaaattgctgtgatacyggtcagcagtcacagccagaaaacataaaacatgtgggcattacacactgacacattagctctttctaaagaagaacatgtcccattctgaaaagaaaattattgctttgtttttgatattgagtctgtattaaaawwttttttttatttttgagacagggtctcactctgttgcccaggctggagtgcagtggtgtgatcatagctcactgcagccttsaactctgggactcaagagttcctcctgcctcagcctcttgagtagctgggactacaggcacatgccaccatgcccagctaatttttctgttttttgtagagacaggatttcgctgtggtgctcaggctggtctccaactcctgggctcaagcaatccgcctgcctcagccttccaaagtgaaaaggttttctctcatttttcaaatagaagtactaaacaatgccagagaaataaataaacaggcaaaatacgttggctatagtttatattatttcctgctasagttaacaaaatgggaaaacattttatcttcatggtctactacatttatgccatgtgttaagtaataaaatagcttttgtaaattataaattaaaaggtacagatttaaaagagaaaatactgtagagtttcatgtaggtaagactgtgtagaatgtcgggtctcgatgttggcgctattcaagccctgatgataaggcttttggcattagatgctgttttgtcttsatggaaaatacagctattctaggatccttgagcctttcataagagataaggttgtgaatcctaagaccctaggaccatttacttagatgatctgctctctggttygtcctctgaaaagtctgcttcgygaggggtgtgctgcatttgccttgcctaagtggtgtggcacacaactgtactgtcaccttaggcttaataaccatgtgtcatctagaatgaagttatattttactaaggatcgtttttgccatgtataacttctcaaacattaactttcagggttattaatccttttaaggtctagtttttcttaagtctgtgcagtaatagaggtatcgtcattcatgtgacataaaagatggaaaggggcttcattcatgttagtgatggaaataggaaagtaggtgaagtgawtctaatagatgtttcttttatgaaataatttttaaaagattctccagccctgcatgatttatgatgaatcattttgtggtctgttagttacttctagagaatagaaagcattgtaggctcagggaaagcaaacattcagaatgaaatccaatagagaaggtaaatttatttgggcatgtacattttggcagcctaggctgtgtacatgtgtacacattctgaacatgtgtgtatattgaaaatcttgtctcttttttattgttaagatttgaaagaagccaacactaaaccacaaatatacaacaaggccattttctcaaacgagagtcagcctttaacggtaagtaaaatcagaatttatactgcatttgtattgaaaartatcccttttaaagaatatgtaaattatacattgtattttattgtaaaatttcctagagagtgatttttgactattataatactttctgctatataattttccagtcagttggactatgcagtgtaacatatttgtctaacacaaaacaaaggtaagataggaaaatgacctagaagttgagaaataactcaaatccttaaaaatgaatctctaattaaagtcttttatattcatgttatttttctacttaagtaataattacattattttagattcttatgatacttttaattaaattgagataaaaattaagatttctttcatggttccctattggccatgcagtcataatctgtggtcacaaaggagaaagtagcttcgtataagccaaatgtgctccattctaggaggaagaattgctaagttatacccggcattaaaactacttccttcctggaactgactagatgggggtaggatttcagaggctccaggggctcccaaagtttcgggatatccaccatggataatttatccttccgaggcctaactatagggttccaagacagttcttagtccccaacttttttgggaaggaaaaggagacctgtcactttaaggttttatgtagttttaggactattgattttggtaaatcatgagctatcacagaatagctcattttcctgaaatctgcaaataaatgaaatccacaacattgaataaagaatcatcagatagatagatacagaaattaatatagagatgtgtatatatgtgggttattatacatatatatgtttgctaactctgtctgcttctagaggacctagaagcagtgactccccagtagcaaactagatcgtggtttccaaatacaggctgagcatcccaaatctgaaaatctgaacttcaaaatgctttcagattccaaactttttgggcatataggtgatgctcaaataaaatactcttggagcattttggattttggatttttggatttgggatgctcaacaagtaagtgttaagcaaatattccaaaatccaaaaaaattcaaaatccgagatatttctggtcccaaacattttggataagagatactcaatctataccatttttccttaaaggaaaccagagctctttggagaagtggttaattctaaggctggggcagggaaaatacaggctgagcctggaggatgttgtggtcagcctgaaagagctcccagtggccaaagctggaacaatttcatcaataaaataactacgtataatattgaattataatctgatttataaataaaatgtatacacatgagtccaaattgatatacataaatgactgaataagtaaataaatggggggagaagaactctttcttgtagaagactttaataaatgtaaaaggaatgagggaaatagaaaattgttgtcacaaagccacagcagtaattgctgcatgcaacttccactaatactaaaattagtgaggtgggccaggcatggtggctcacgcctgtaatcccagaactttgggatgctgaggtgggcggatcatttgaggtcaggagttcgagaccagactggccaacatggtgaaaccccatctctactaaaaatataaaaattagctgggtgtgatggcggatgcccataatcccagctacttgggaggctgaggcatgagaatcagttgaacccaagaggtggaggttgcagtgagctgagatcgcaccactgtactacagcctgagcaacagcaagactccctctcaaaaaattaattaattaattaattaattaattgagtgaaagtttaaggtgaaacagaatatttgcataacctcaaagtatctgcccccacttactcagtaattacaaaaggaaaaatagtaactttacagtggagaatcctgatggacaccaccttaaccacatgatcaaggtcaatatcaaggatagtaagacatagtgagctcataygcccctgatagaatgtcctgaaaaggacagatcatgcctttcgaattcttcccaaacatccttaatctcatttgactatgagaaagctttaacctaaatacaaacacattcttcaaaatatctgaccctcgccgttcaacagtgtcagaggcataaaagacacatctttgctaagraatcactacagattaggaggagaatattgcatgacaaytaaatgcaatgtgggatcctggattggatcctagagctgaaaagggacgttagtaggaaaactggtgaaatccaaatagttatagtattgtgccattctcaatttattaggtctttttttgcttttattattatttttaattaacatataattgtacatatttatgtggtacagtgtgacatttcaatacstgcatacaatgtgtaatgatcaaatcagggtaagtagcatatccatcacctcagacacttatcatttttttgtattgggagcattcaaaatctgctcttctagctattggaaaatatacgataggttgctgttaattatatttaccccacagtgctatagatcattagaactattccttgtatctaactgtagttttgtgtctggtaaccaatctctygctatccccagcccttcccagcctctagtagcaactattctactgtccacttttatgagatcaactttttaaacttcgcatatgagtgagaacatgtggtatctgtctgcttatttcacttaacataatcaccaccaagctcatccatgttgtcatgaatgacaggatttcattctgttttatggctgaatggtattccatcgtgtatgtgagccacattttctttatccattcatctgttgctggaactcaggtggatgctgtatgttggcttcagtgtatcaacactgataattgtgctgggactgcactgtggtaactggggggaagctggctgaaaggtatgtaggaactccctccactatctttgcaacctttctgtaagcctcagattatttcaagttaagtagttttttaaggtcacaatggagtcactaaataatcattctcattagattttcgctaatttatagaggaagattctgcatttgcaaatcttagaacagagtaatgcaggggcattcttttcatcaagactatttcttgagctattttctaatccttctcatacacactcccatccctacctctacaagtctggtctctatttagtgtacttaatactttagccagttgcttacagccctctagaaacctgtgagtgggaataactccacaaagctctgcctcctcgggaaccacatcttagcagtgttttttgttggtgacagtgagggtctaatttgaatgttcacaccagaactgtcaaagtatttcatgcaatactttgaaaaaaatctcttgatccaccaatcatcattacccaagacaggatttgaacaagaatttagaactcgtagtcttatatttgtttgaatgggaagaggagagaagcagaccgtattgtttctaggcaaaatgtctgggaattcagtgaatacaagtagtactacgggaactttcattcttaaaggaaatcaatgacagcattaagttgtctagaaaatcagtttaactttagaaaagcataaagccgtttaaaatcaaaagagcaaactcttaaaagacaaagttaggagcaggtacgtactttggcgtctgaaaatgagcggtctaaattcaagcattttgacatgaaaaatgaaatgtgaagtatttggaattcaaccctgaatttttttgccggtaactcttgtgtatgttcaactaatttagcaaactgcactrgttcacattttttaggtgaaacaagaaataacagaagttgcacctaaagtagtcaaatttcgtagagacagaaagtggaatggtgcttaccaggggctgsggcactggaaaggaacggggagttrgtgtttaatggggacagtttcagttttgcaagatgaaagcatcctggagaatggttacacaacattgtgagtgtacttaatgccattgaatgcacacttaaaatggttaaaatggtaaattttatattgtgtatattttatacagttttaaaaactaaaaaaaaaaagtaacaagtcttcagcagttatattccacttcattgccagggtgtctggctctaaggggaatctctgcttagaggaccattaatccttaggaacctttttttttwwaaaaaatctaaagatggttcctggacatcatttaccaactggcagtttaaatggcctgtgtaccataaattgtgaggttaaaaaaaatctggtacacaggaaacagtagagctgggtggctgggagagttgcttttggggttaatttataactaagacaaatgaatctatgaaaagaagaaaagccccgtaagaaatatgctaactgatggtgagggagaaaagggtttagataaaagatatctgaacttgtttggtctcartgattttatgactgaggaattcaattatagatgtactggatggagcaaatcacaattctgtaaattactaataggacacaacgatctttatcattttctgtatgtgctcacatgcaaagttcagtcctgccctctgtaaataaactctctgcctagctatacccatgctatgaattcagggcttgagtgttgaaacataggcaatgcttactgccccaaccttaaaggcaggtggaactgagattaggaacgaagacaaattacttttgcttttgaattttggccttcgggtttgtttcatttttgttcatttcttttcatttttattactaaaaagctgattttttaaaataaaaagatcacaaccacacaaaaaaactattcttctgtagtttcttccagttttgttcacatgtgtatgctttttatttactgacagttaccgtatatacatcacttggccctcagcctctttcactgttaggtcctataaatttttcatttctacctggctttcagagttttcataatggcaacataatcttagtgatagcacrtaatttrctaagccagtttttaggtggcttctggtgtttttattattgtataattatgttttattcttataccattacataccatgaatatctttatgtaaatatttcactcaattaaaaaaatattttcttcagataaattgccaagagaggaatttctttgttaaagtgtttgagcaattaattaccttactcttgcattattaattttatgacatttcaaattgcttggaggatatattaatagcaaatgaacaaaacatacaaagcataaatatattttggaaatacatttaaatgatttctgttaatttaaatgaattatcatttacttaaggctttgggtgtatgatagtggtgggaggctggagagtgaagcgcttcaatagttgtttagagattagaacgatgtgagtggtttatttttatttttattctttagaggcagggccttcctctgttgctcaggctggagtgcagtggtgcaatcatagctcactgcaacttcaaattcctggactcaagtgaccctcttgcctcagccaccggagtagctgggactacaggcacacaccaccgcacctggctaattgctaaattattttcagagatgaggccttgctatgttgctcagactggtctcaaacgtctggcctcaagcaatcctcctgccttggcctcccaaatggtgtttttttaaaaaacccagcttaatagcaaagaagttacagattatttcctgaggctatgtcaaatttaaataaaatgtaaagactgtgctgtgggtcccttaccacctttaagtctaagttgctagttattaggaagaaatgattgcttttgaaaatgcagatttaacaaagtaggactttcatagagataagttcaaatcagtttttaaaaaatattcatttaaaaccaaatatttttaaatttgtggtttgaatatttgagaaacaaatttaagaataaagatacaataagaattttaagatacaaaactatatgtttacaatatattaaaatgaataggaaaaagattatgggtgaaactctctcctttttattctcaactttctgtttgggggttcagtgtctccttccacagttttctttgcctcaaataaataaagccaattatgagctctacagtctgagttatagyattcttggttctttgggtaccgccaataacttatatatcacaaataatacatatacagtgttacatagtaagtgctcaataattggaagctagttccatggggcaaaaggaaagcaactgtgttctctttcatactgttctagttttttttttcctttaagcttgtgacttcttgttcttcagtccagatcctgtgatctgaaataatttaaattattaaaagttagatatttttaaccttttatactcccactagacaggacataggaaatttagtgaygtaagcatctttaataatccttaaaagtcataagacttggtggctgggacaagaaacaattaggtataaatttcagggaaataccataatggcatgacttttgttttcttttgttaacaagccacatggctttcctctcaagcccaaggaatacatagtgtgctctccttttaagatttcagttttgtctgcatcacagagatgtatgtttccctaagtttgctcactataatttgtgattgctatttttcttatctgcgaaggaagtacagcarctcccactggggaaataccatgttaagttgatcctaaaataagaaatctaagggaaaggtcacatcctaataacttgtgcaaatctaaattcccatggagctttgcaatcattttgtaggagtataaaaaatctattattgaacttcttccagatagcgtcgtaaaattgaagtacttttatatacagaagtaaccactaaattataaatacaattgacaagacctaattttttaagcaatctattatgaatacgtagagaaatctggcatgactaataaaccacaaaatctttcttgtcactttcactggaaatataaagtatattactcatgaagtattgtgataattacatacaatagtaatttcctattactatagagatatttaatactcaatttttactttttttttttttaactgatgctgaccttttagttatactttggaagaaccttaaccatgttgttccagggaaattcactgctttgggagccaggtcactgagttactactgtctttcctcytctgttctttggccatcgtttaagtttccttacctgttaagtaagaaaggtttatgttaaggatcaagtaagatcaaatatataaagggyttagaaataatttacggcgtatatttatggtattactgtaataattgccttgacttttttatcttttccaaatgaataaatcaaaatagaaagaggttgagtaacttactcgagctaacagtcaccggtacacgctaatcagtgccccactcactggtcaaatctaagtaattcttcaagggatggaatgtaaatggaaactgctcccttatgctgcatacagaggtattacattttgcagtaaggattgattgtttcctagcacgtagtaactaacctgttttgaggatgcgttgttagaaatgcatcttggacatttatgtatatatacgtgcatatatatatgtatgtatgtatgcatgtatgtatcgctagaggaatgtgcgtccttgctttcttactacaaattaaagctgaacagaatgtggtgtttgtcttttggtattgtctgaataaataccaatatctactagtatttatttccttgctggtaataatgtgttttcattaatttaagatttataggaacatacttgggtgctcygcctgctagaaactgatctgtagcatgagccatttgttgaaagtacttagatatttctgcatttatttatttctgtttcagaccccacaataactatattactataagaaatataggccagacacagtgggtgggtcacacctgtaatcccaggagtttgggaggccaggtgggtgggttacacctgtaatcccagcagtttgggaggcccaggtgggaggatggcttgaggccaagagttggagaccagcgtaagcaacatagtgagaccctgtctctgcaaaaattaaaataaaaaaattagccaagcatggtggcgcccgccagtaatcccaactactcaggtggctgaagcaggaggatcacttgagcagggaggtcaaggctgcagtgagccataattgcaccactgcactccagcctgagggacagagtgagaccctgtcaaagaaaaagaaaagagaagagaagactaaattgttttttacatgcttatctatgtgatgtgagttcaaagaatctctgcaatgattcaatatctttttaatatttttgtttgggaaaagcattaagctccttcattgtgttaattaattcagttttctcttttatgttatacaccagcatgaaaagtgtgagatgttagaggcccacatcagtaccctaccacatatttaccaggaaaagctgactttatgcttaatggcagcagtcacccctttaaaatgtgtggcctctgtgtccgatggcgtggactcacttcctttaagttcatggccttctgaagatcagctgggctgggatgagtggtggctggcatgtggtggagtgtcttgcttccctctgatacatggaagttataaaaagtctcactaatgaatgttcttaatatatatggggtaactaatttatgcatcagactttggaataaaagtaatagcaacagcaaatgagagtctaagaataattcatttttttgatacacttctgcccccaggtgccaaatgctacagggtggaggcggagggagacagaaaatctttctgtataggaacctactgatcgctgctactataaatttttctaaccattttatttccattgattattgttttagttcaggttttccttattcctcatttgggttattgcagattaactctctgaccaagcaatccatcgtttccatcatcctccagtccatagttatatttcatcccctttcagagagcattacagactctgtggtcggcccagcctacctcttcgatgtcatcacctccacctgctcccacaaatcttatgggtcagacacaccaggctgctcagtgtcctctcacagtgctgagtttatgactgggrtggattgattttcatactattgttgattcaacattttttatagtatacttcttgagaacagagaccrtgttcagggatccctagtgcttaatacaattcctaccaaatattatgcaagtaataaaattgcagtgtcattgaacattttcagatatgcatttatttctactaattaatcttagtagtattagcagccttgactaaatattatttctaaattgatcaacatgcgatgcaaagcatgctacagaattgaattaagaaaagaatttccatgagagatatgcatttacaattttgtagatttaatctttgcatagacttttttgttgcagatactgaaaakgaatccataaaaatacatagatccctttactagccacttttaatttacggatgaggaatattcagttcacagactggctagcgctttttagctttctttagcgtttgaagcagggcttctaagtcacatgaaagactagactagttattggcatttaaattttttggctcctacttgtatgtattatttattaaacaagtagttattgcactacctttatgtatgcagcactgttttagacaaaatagaattgtgacatattccttgctcatggtcttgtttcaaagacaatacctacaactgaaagaattaaataatagagccaggcaatatctgattgaggaaaagcatgcagtaaaagttcagagaagaagatacacgtgcagaactggaatggtcagtagttgcttcatgagatggttgcactgagctgaacccttaagtaaggatgtggatacatgagaaggaagaagctggaaattttaaacatgaggagcttcatggggaaagaatttcaagctatcaaaagatatcaaagattgaggaatttggacttggtctgggaggtattggggatcttgaagatttgggggtagggaagtgatatgacaaaagctgtgtttggaaggcacaagtgaaacagagttgggtttttttgtttgtttgtttgtttgtttttttcagacagggtctcactctgttgctcaggctggagtgcagtggtaccatcttggctcactgcaacctcaacctcccaggctggagtgatcctcccacctcagcctcccaattagctgggactataggcatacaacaccatgcctagctaatttttgtatttttttttaatagaggtggaatctcgctatgttggccagcctggtcttgaactcctgagctcaagccatcctcccacctcagcctcccaaagtgttgagattatgggcgtgagccactgtgcccagctaaaagagagattttgatagcttatatgatttgatgactgaataaaaaataaagaggatgaaaaaagtgaaaaatgaatttttggctgataaatagagaaatggaggtattaaaagaaattgggaagagagactctgtttcaggaggaagagggattagcttgatttttggatttgatgaagatgtgaagttaggtgaccagacctcgattcagattttagaatcagactctttgatttggtgtcattaacattgattgaagaatgttttgaaagctgaggtattaagaaacaacacaaaggtggagtttaaaagaggaagttgagcgtttggagagagtgccatgccaaaggaggggacttttaagaaaaggaagacaacacttagtacttctgtgtacccagccttgtaggaataactttacctgtgtaatcttattttattctcacagtaccatgtaaagtatgaattatcattgtccctatttgacaggtgaattaagtgaagtttattgtggttaaataacttgcctgaatgtcgtgctgctggtgcaaggttaatctggatttaaactgagatctgtctgtctaacccccaagcccacatatttttttaattgaaatgctgcaaaatggtaatgaaaggtcaagaagaataaaaaaaaaaagagtaaggccattagaatgttcaaggagaagatcattgtttaagattataaaagcgtagtggtaggaatatttcagcatttagaaggtaatagtaaattaatggaggaagtgaccctagaccattgctaatttgggcagcgagtaggacagttctcttctgaggcagctgagtcaagtacagcagagaagagtgctcatcagtggagaaggtgggaatagtgttggagaggtctcagaataaacattaagtaatcccagcactttgagaggctaaagcgtgtgaatcacctgaagtcaggagttcaagagcagcctggccaacatggtgaaatcccgtttccactaaaaatacaaaaattagccacgtgtgttggcactcacctgtaatccccgttacttgggaggctgaggcaggaaaatctcttgaacccaggaggtggaggttgtagtgaaccgagatcgtgccactgcactccaggctgggcaacagagcaagactctgtctcaaaagaaaaaaaaaagaatagacattaaaaagacacagacgatgtgagaaaaaagactgttcccaccaagtttagaagaaaggataatgaggttgatgtgcctgctgtgccggggggataagagaaaggtgtcaggcaagaatagatgtataaaagcactagttacaactatactttgaaagtcatattttacctggaagaaatctcaaaaaacaaagactacatggcagttaagtgacccaaatcaagtcactttccctcttcaggcctcagttttcccatatgttagacaggttaaattaggtgagacaaactgatcttttaggaccattctataatactgtgcttaactttctaagcattctggaatggagcagccttgatcttttcacagatacgtcaaccatatagctttatttataaaacgaacatgttgagataactaaaattagagttaatatcttcataggtacaaagaaacttttagaacttaagtccacaagtcagaatttctggatgaattcctttttcctcttattaaaaattgttaagatgtctgattagactagttgtaaattcccttgaaagcaaggatgatatcctgctctctactgtgtcctcagcatcaaggacagtgcctaacacagaacaactaccaatgaatatttatgaaatgaatgaaagtttgaattgcaaaattaaatgccaccaataaagaggctttgtgagcgagcgtggtggctcaagcctgtaattccagcactttgggaggctgaggcgggcggatcacttgagctcaggaggtcaagaccagcctggccaatatggtgagaccccgtctctactaaaaatacaaaacattgtctgggcgcagtggctcacacctgtaatcccaacactgggaggctgaggtgggcagatcgcctgaggtcaggagttcaagaccagcctggccaacatggtaaaaccccgtctctactaaagatacaaaaattagccaggtgtggtggcaggcacctataatcctagctacttgggaggctgaggcaggagaatcacttcaacccaagaggcggaggttgcagtgagccaagatcacgccgttgcactctagcctgggcgacaagagcgagactttgtctctaaataaataaataaataaaagtataaaaaacgagccagtgtcgtggtgtgcacctgtagtcccagatactcgggaggctgaggcaggagaatcgcttgaacccaggaggtggaggttgcagtgagccgagattgcaccactrcactccagcctgggggacagagcaagactctgtctcaaaaawaaataaataaataaataaaggcttagtatagaactcttcccagtcttttttctccactttgattttttttttttttctcaatctcttccatgacaattcagggacacattaattgtgcaaaaggcagtcacttgtctgtattgtctatttttatatcacttaaattggtttttcatttggttgctatgttgacattttatgaaaagggaactaaacttgtgaattgactgacagtggaaatcataggattttcaaaaataagttttgtagttacttaaaaattagtattccagttttcggtcgttcattagtttaaatgttaccaataatattttctttataaaaagaaattatgttttatattgtagaggaaaaatgatttagaaaaacagaaatctatttctgaacaaatttagtgatgctgatgtaagaaaaagaaaaccacaagaagtcatcccaaatttagtaatgcttcctatcttaaacacatgatttcacttgtcttctggctagctaaaggttacaaaatgtcaccataataccttttacttccttatgagttcttgctactccaccccctacccccaaatatggtagatcgagttgtaaaaaccctgaagtatgacaatatagtttattgcacttatagttagaattattctgccaagatgagctgagaaatggaggaaatggatttaaatttacagcagtccagtgatacacaatatgcgttttccagaccactgaaacagcaagccaacttttaactttaatacttcatacagtggaaaagttacagctgtaataaaatcaacagatacatctctggttaatgttctcaaatgagaaaattgactgcaagaacatttgtccaaatacatgtttttatatattttatgctactttccagaatattaacagttttacatagcrctgttttggaagtcactcattgttttcatctttctgattaagaaatagggccaaagttgtacattgcactagtagtagacttttaaagatgtctttgtctctttttcagtactaagcttcaagttcatagattatccttgatctttcctttccctaggtagagatttagagtatttgtttatgtgagatatatataaaaaaaaaggagattttaacaaatgactgtttgattcttgggtagaaactaatactgatcaagaccaaccaagtattcagacaagatcgggcgtgttcagggtggtacggccatagacgacaaccaagtattcaaacattgagtgttcagtggaggctgtacagatatcctgggttttgattcaagatagtgagatagccatcctatgagaatgtgaacttgaaataagattttgattacttttttttcctcctttaaaggtttgttcaattttaactattttttttcaaaatctgcattatcacagtatattttaaaagaatgactaatttactgtgatatatttgggagttaccttgaaagagattatcttgtaatttaaaataccagaggtagagtgaagagtcaggtggtaaaagagaaggagactggatgtttgtacccggtttgcttcttcccctttgttctgctgctggttttattttagctgttctgtttgcctcaccgcaggcagcgtcaccactccggttccaatcttctggacgtagagttttcaaaccatctataaattagcagtctaagtggaactttggcaaatgaggttgccaacaagcattttctttatatttagataatttgagctcatggcctcygggcatttggtaagaagtccagtaaagagaagcctaaagaacagaatctttattatgagtagtcgcctttttccactcagcagtttgattccaagcaccctgagaaaaactagagacatagtctagttggcaggttttttgaagagaatgagaagcccaaaccaaaagataatgaagaccacagcagagaactaccgaggcagctggcgcagatgcttttttggcactgttgagaaaggcttcagacccacagtctgaagagatggagaacccctcctccaggagcaaggaataagaatgacaattgttctgtaggacagttgacttagattcaggaaagttcttcagaaaatatattcagatcacaaaaaaggtgttaaaatcccaggatttttcagccaaggatggcacttgcttctttcagcatcactcatcaagttgaaatttatgagtgtcctttgttatcacaaacaaagcaagcaaactgaacaaatgagaatgcttctttagtatytacatagcactttaaaagctctgttttctttacaaaatgtgtgtatggaaaggtaaaatgggaataaatagtattaaattctgttcttagaacctactgtatagtgattgaacagctaaacagaacgaaaaagcatgcacatcttacagatacagagatcatgactttggtagatgagactaacatgtatgaaggtgtaggaagaakgtttatttttcagtccaaggaagcaattcacaatcaactgttagagaagcagcaaatagcgaagaaaaaattaaagaactagaacagaaaaagtcctacctggagcggrgcgttaaggaagctgagaacaacatccgggagatgctgatggcacgaagggcccagtagggagcctctctgggaagctcttcctcctgcccctctcattcctggtgggggcagaggagtctctgcagggaaacagcttctcctctgccctgatggatgctttatttggatggcctggcaacgtcacattttctgcatcaccctgagccccatttgcttcccagccctggagtttttaccctggctttgcctgccacctctgcccaggacactcttccctcttggggtgtgtgatgaactcccaggagaggaaagatgggagccagggcaagataggaagctctgcctgagctttccactaggcacrccagccagaccaataaaaagcatctgtcccactctgctaagcctgcttttcttgagcagagggtgagagaggcagtggccatctccacctcagctcctgctccctctgcatcagagcccttcctttcttgggggatgggctcttgccctcttctcttttcccttcctgtatctttgactaacgcctcagctttcaggcctacatgtagcagacagaagaggaagaaagaacagacgttcacagctgaatctcagtgaacagaatagcagtccctggatggcagtctgcctaaagattcctttccctgccttctcccatacattccaaaaggaagttcaacagtcagcagcacctccaagactgtctccttttggccaatatcataagatggacgccgtaatcctgaggcctcctagaggctgagggggcaatggtgtgctccagctggctcatcccagcccaggtgggccaattattcaattttcaagaattttgttgcaagccagttgttaaacacagccattataattatgtaaatttgcaaattatgttaaaaacaaggacaataaatactcaaaatgcaaaaaaaaaaaaaaaaacctactgcatagtgtaatagtgctctcacttttctctccttgattctgatgtcaatcactcattgtcacctccactagagggggataaaaaggataataggaaatcagaatattttgatttgtagttcaactgttgatcaattatctttgagacttttaacattcatgactaaggaggattaataattaacatgagctgtagaattaaggtttgtrtggcatgataagtataaaccagttttgggaccgctataattctaaaaaagcaggtagactagatgattagttgtacacttattactgctaattcttgattgtagaacaaattttcctatgaaaaccatgttgtgtattttatatctctattagttcgttaaaagtttagcagttttagatgtcsaaccagtaaaaaacaagttgcccattctatcatttttttttattgtggtaaaatatatttaagataaaatttacgattttaaccatcttaagtgtacattggtacagtggcattggttacgttcacaatgttgtacaactgtcatccctatctatttccaaagctttttcatcacccaaacagctctatacccactaaacaacaactccacatcacccactccccagccctggttatctctgttctactttctgtctctatgaattcggatattccagttgtttcatataagtggactcatataatatttgtcctttttgtatggcttatttcatttagcacagtgtcttcaaggtgcatccatgttgtagcatgtatcagaatgccattcctttttatggctgagtaatattcccttgcatggatatataccacattgtgtttctccattcatctactgatggatacttgggttgtttttgccttttgctattgcagataatgcttcagtaaacattggtgttcaagtatctgttttagtccccrcttttagttcttttgggtatatacccaggagtgaaatgctgggtcacatggtaattctgttttgctttttaagcaactgccaaactgcttttcacagctgctataccattctgcattcccactgcaatatatatgggttctaatatctctacattgctacaacaccttttttwaaaaaaaaaaaaaaaaaaaaagctgtcctattaggtgtcaagtgttatctcattgtggttttgatttgcattttcctaatggctgctgatgttaagcatcttttcatgtgcttattggtcatttgtatgggttctttggagaaatgtgtattcaagacttttgtccatttttaaattgggttgtttgccttttgcctttctattcttctctcacttttaaattgattttctcccatatttctccacaaagtcaaaaagatgatttcatttgaacacagataaatgctgtcagccttccattgccatatacattgaattaaggtcaaatgctttttgtgctgttgctaaaatcacttgagaatctgtctctcttcaactgaaagaattgttctggatgcgttgatgctgtggaattccttgtactctctcccaaatctcatttaacaagctcacatttagggtgtgattcactgtgaagtattccagaaaataaaatccattttctcagaatgatgagaaattttacaccttgaagagaccatctcttttccaaactgagatccacagattcttggagatccacaratatattcttgggctctgagagttttagaattttaaaataatctgtttttatatcaataatctaaaaggtcattagaaagcccacatttcacaatacaaggacattttcctggaatgagactgttttcttacattagtaagatggaagtgacttgcctaagataacacagcaagttaaaaccaacactaaaactcatctttggaagcttttctcagtgttctttgttactagtgtggagatcttgcaatgattctgtcttcattaagtctacaggtagtggggaaagcagaaaaagaacaagtattaactaaaatgatgagtgctgtaagggagagaaatggcagtatgagttgtgtagaatgagagcagttgcataggatgagttaagttactgtgagagtttgaggaggtggtttttatgccgatagttgaagagtgaattggagttaccttaagggggttgtgagaagaaccatgttacagatggaggaaatragatgtgaaggctgtgatgtgggaaacagcttagtttactccctgatttaaatggagaaaaggaatccagtgaggcttcagagagaagcaagaactaggttattcagggtttaagacaatcaaaagtcaaaatagagtttaaacaggggagtgacataacctgatttgcatcatgctggctgtagtatgcagaattgattggagaggcaagratggcagacaggacgccaggtgggaagctatggaaaggtgcatatggaagaagagagtgtctttggattccagttggtaagtggaagagactgaagcatgtggctgaatgtaaatgtttaataagtagaattaaaaggacatggcgattggtttgatggggatgtctgggccttcaattatgactccctgtttttggcaatgatcagctgggagattggtggcagcatttactaagacagggctcattgaaggaggaccagttttagggaatagaggatgaatggagtttttaacctgttgagtttcagttgcctgtgagatatttcaatggagttaccaaatagatatttctatgtagtgtcaaggttcagactagaggactgaggcagagatataaatttggtcttaatatatccatagtgcttgaaactatatgtgtggagatagttatatactaatggttgtcaaattaagcattttttccaattcctttcccagaatctagtcatgtgaaatgatgaggaactggaatgtacagtgtatacattgttcttggcaaaactaaatttaaatttctgcttaacctaatcaaccaaaaagccctttttatttctgcctgtgtaaaatctttcttcaacatattaagccatttttctgtcttggtaaatatgatagggtgaaataaaatttaaattgaatttagatagccctgaattgatgattcaagaacttttagaatcttagttttatttttgagtagcaaataacattatactgtagatataaaaaatgttgaagattatcccaggragtgctctggaagctgcttttaaaaataaataacttttaaactgccttttctcccttagcatttgcccatttgttctaaaggtagaagaacaactttcagtgtgttaagggtttttaatagttaatcacagttatatggcatttgtttttgtttaatatgtggatttttatgtaatgccacccagaggcctaggtatatcagtacattcctcagcattattaatgtcatccaaatagattgtctttgattactgatcactgactccatatatagggcagtgatttcaaaattattctactaccattgcaagtagacatgtatacagtaaagaaccatccaaaggccaggagcagtgactcaggcctatagtcccagcactttgggagaccaaggtgggaggatcgtttgagcccaggagttcaagactagcctgggaaacatagtgagaccccatctctacaaaaaattttaaaaattggctgggcatggtgggatgcatacttgtagtcccagctacttgggaggctgagggaggatcgcttgagcccgggaggtccaggctccagtgagccatgttcacaccactgcactccaacctaggcaacagagtgagatcctgtctctaaaaataaaaattctgaaaagttacatctaaattaggtttgagtaaatgaagtcatgagccaactgcataggtgatctttctagtggtagcaataccaaagtgggccttgtaaaaacaaacaaacaaacaaacaaaaacacccttttaaatgtagttcagggagaaggaagctagtatttcaacttactgtatgccaagcacttctaagtgctttacattattctctttaatattatttcttatattcatcaccacaatcctcatttacaactgaggaaacagaaggaggttaaatagctttgcccaaagttacaccactggcatgtggtaatgtagggcttccagcttgagtatatctaattttatagccatcattctttctctttccatctctgtatctctctgggagtcaggagacctatattcctgtgtttttgttgttgtcgttttgagacagagtctcactctgttgctcaggctggagtgcagtggtgccatcgtggctcactgcaacctcaacctaccgggctcgagtgatcctcagctgtgccatctcgctatggaaccttggctaagccacgttctgagctatggtaaagcacagtaataggttcacattcactctcccccatcatgcttatgccccctacctcgtctagaaggctccacacttcctttctgtgtgctcgttcattcagtcgtcagtcatttcgtcagttagtcagacaacagactttgttcatacgacattagtgactgaggttctgttgagtgacgcagataggaaataacctagctgcatggttgctgtctttcaaaaggccgtactcttaggatccacatacaggcccccatcttcygtgaagccattgtccccagccatcccattttgacgagtttttttgagtccctgtgaaactttggcttttttacatttatctggcagttaactaggtgctgctttgtgacagttcttctattattggatgcaattcttaattcaaatcatgtatcattacttaacttttcacctctttgcagcttctttctcccagaagattacaagttccttaagagcaggcttatacttctttgtataatatttcccacagtgtctcttaaatagcaaagttttttgacctgatttactaaaaaaaagtttgttgacttggcttaaattttattttcttttctttttttctttttttttttytttgagacagagtcttgctctgtgaccctggctggagtgcagtggtacgattttggctcactgcaacctctgcctcccgggttcaaacaattctcgtgcctcagtctcccaagtagccaggattacaggtgcccaccaccatgcccaaccaatttttatatttttagtagagatgggttttcgccatgttgtccaggctggtctcgaactcytgacctcaagtggtccaccctcctcggcctcccaaagtgttgggattacaggtgtggaagccaccgtgcctggctgacttgggttaaatttttaagtttagagtttactccctggttgaatgatttgggccaagttacatagcttctgtgaacctcctcagttttcaacaaaatgggaataattcctacttctcaagatgaaatatataatatatgcaaaagtgctctgtgaactctaaaagactatacaaatattactgattattttatactttttagtcaaagcccccctgtcctgcattgttccagtagacactttatgtaccaacatgtacttcagctgttcacattatatacttttatctctgttatcctaccatctaggtcaatacattttaacatctttatttgctgtaagtttatttctaattttttattctttattttgtttattcccrtacttaacttttacttacgactacggatttaagtagcatgaactgtcttcagactggcctcctgtgatgagtcacaaggcccatcataatggatccagattgcaaaattgggagtaatagaaattactgttaattttcttgtaaggtagtttaatgcatttacttgcagtttcagatgggtagaaatggtacgttgttaggaattcactattgagatgatttttagtctgtattagagctctgaatactctgcaaataatatgtgagcactggtaccatcaaagcatgtgttgccttaggtggtgtttacagaccttgtcagagttggtastaattccagaatataatcatttcaatagctaaggcttatggttaagacttccaaagtgttcagaatttactaaattgaattatttgaggttttgttactgtgttacttgtagtcatcaaatcaagctttattttactgccttcattgaaataagcagttttgaccatttaaaaatatttttaataggatacttattttctctagcatttttagagtgtggttcctgtgtggtgaatgtctgtcacctcttggaagccttgaaatacacaaattgactattgttgtttatgttgaaagatattaaaatgagatttgtaattgaaacgggcattacttatttcacatctggttgcttgaaaagtggccagatgcaacaattcttaatgcaagagagcctacggcaaaaactttgcaattctcaccctctacaaaacagctgccctgtgtgaaccttcagtggaaaaagaagaagaaaagcaaagcaaagaaaattcaccccaccacgttctaattacagatttccaataaaagtattaatatgattcctacatcaatgagctaatcattagaagtagaaggcaatgtggggaaaaaaaaamaaaacaagaatggcagcactgacctagtttctagttgccaggaccaaagacgtcgtgacaccactgtcctttctaaatctccttaccttgcttaatcttaaagtgatggtatgtcctggtttgcctgacagtcctggtttatgcctgttgtcctagtgtgattttttgatagtgccctctttcactcttaaaagtgtcccagtttgggtaaggaggtatatgcccatcttaatttaatctctttatctcagagacattaattaggaagggtaagaagtgggagttatgagaatgtatcaaagggaaaatgatactccagttgagacagtgctggaaccaaaatgctgctgatctgaattctccgtaataagatgagaattggtttgcgaacacattctaaacatcacaagatacatcagattaatgctggttgctcttggggagttgtggggaggaggataaccaggtcaggagtttgtggtatcttttatgcaacactaacgttaagcttcctgtctgaggttttccatgttgtgagttttcacctcttgatactctttgaggactagtgatgctgacatctactagaaacacttcagagaaaaaaaaagatggaagataatagttctttagaaaaatggaaacatttacattattcttgataactttgttcttctttgaaaaagattagctgaacatccctgctgattaccttaataatctactctgaaattaattttatctactctagaaggtttgctgtggatagattctcctttagagtcctccagatttgatagctattattttttaataatagttaagtgcctttattttgtttaaagtactgaaaactgaatcaggtctcaggaactagttatgagcaactgattatttagctgggaaaagaaggtaaggaagaagaatatttgaacaaaggcctttaggtttttataaagacattatgcaaagagtgataaccatctttcttacaacctcttctcaaagtaaagcaagggggctgagcttcttgtggacatttaagtttgaatagggtactctcctgaaggcctttaaaaatacagtagcttgtctgtttggagtttagcaatcaatcaatcaagtcttgaacacctaatgctgcgctaagaattataaatgaactagaaggcatactcttttcatgtcttcaaatgacttaataatatacttggggaaataaaacaaatatacgtgaaacagatcaggtctaaattatgtggtattgactctatgagttactaggatgaattggcattcaaagagcatttaatttgtgccaaccaatagaaatatctcattgtgttacagcataagaaagatcaggaagccagaaacaagtcttagtggatggcagaaaataagaatatatacattcatttctacactaatgcatctattcagtatttcttgaggacttactgtatactataggcacataggagtgagtaggtacattgttctgagtagaacttatgtgttaggaaatagggaacaaaaaagtgggaggacaggtgggtgtgtgggcagagtatagcaataatattgttaacctatgcaaaggttaggctgattctgaatagagcaagagtttataatggaagattccttttaacacttaaaattcatgaaacgaagagctcaaagaaaatcttagaagccatctaatctactctcctttccctatctccacttgaaaaatggggacttaagagcagagctgttgcgacttgcctgaattcataaaccgagttagtggcggagctgaaagtcgagcctggctcttctgtttttaccatttgcagttgctcccacccctgcccccattcatgggttccacatccatggattcaaccaactatggatcaaaagtattttttaaaaataaataaaaatagcaatacaataattaaaaatagaaaatgtaaaatacggtataaacaactatttacatagcattacattgtrttagttattatacataatctagagatgatttaaagtatatgggagaatgtgcataggttatgttcaaatactatgctattttagattagggacttgagcatcttggatttttgtatccacaacgtcctggaaccaatccttcatgaatamggaaggacaaataaatatatccttctgcctcttcagtcttaaagttagctaaaacatttcacttccccatgccaactctgtgaataccagatcttagatcctaaactaaaggtttggaaggcaatcattattcaggcataggtaggaaagtatgacttagaaaatgaatctgtttcgtgtctcaattttaataaaagtcttgtttataaaatgatgaaaggctcaatgagattaacaacatacaacttgtaataaatgttttgtaaccatgacactgatgagctgtgttttagacctagctgtcactaattggctgtgtgatttttgcacaaattatgtctcctcttttgtctttatttatattatgacagaatttaaattgtttcagttattttattactatatagatatctctctcttaaaattgcttgagtacagcacagacttcaaggaaaaaatttcttatgattctcagtgttcacataatttgtattaaatgtaacttaaatatgtgtaaaacaagttgtaaactatgtttatagctcttatatatttacacaaccaaaataaattttaaaataagttgtaaagcccttaacattaaaggtacaaatatggaaattactgctatagcatatacttttggggattcaacaccttttgctgcttaatgccatatctgattaaatttttccaagacttttttctttttcaactcttctgtgaaacattcctttctacagtattactggatctagtttgaacttcagttaactcagatgaatcatttacatattaaaagtttacctttgttcttctttcactaaccttagacaactaaagttgtgatattgggcaccagtgaaatcacaggtagaaactgtggcactgaaactgcttgtctgtattcagttataaaatcatacatataatctaaaatatgaattcttatacattttatgtcattaaaattaaggtaaaattgaaaacagagttaaaaacttttcctcagaaatcggaaacaatctaaatgtccatcagctgaatggatagacaaaatgtgctgtatcaatacacagcctaatctaggcagttcagcagtaaacaggcatgaactgctgacacatgccacaacctgaacctccagactcaacctcggaacctccaaaacattatgctaagtgaaaaaaaaccaaacacatgagaccatatatcatatgattccatttatctgaaatgtctaataaaagaagcaaatctatagaggcagaaaagtataatagattaacagttgtctgggattgggggtagtaattggcgtttgattgtaaatcagcatgacagatcttactaggtgatgaaaatgttctaaaactgatttatggtgatggttgcaaagcttggtaaatttactaaaattcgttgaattgcacattcaaaatggtgaactttatgctatgtaaaatatgcatcaataacgctgttttaaaagctttttatgaagacttctagatctcctaagaatatttaggtatcagatattttcgcccttgacccttccaaggtcagaagacacagctgaaaaaatacttttagtggaaccaaagaatggatccagtaactacagtatcgtggattctagctttgactttgtcactgactgyacttgggcaaggcctgggcaagtcacttaacctctttttgctttggtttccccatctgtaaagagggtgttagtttaaatgttctccaggatttcttgcacacatgagagtcgcatcctcacatttctgttatctgtgaatctctacctcctaatgattccccctccctcaaatactctaacaaagcccctttattcagcatggcatatgtggcatattgcttgtctgactaattcttgctcacrcaagcttcctgaccttactgcataggtctttcaggtacacagttctcaaagtgttgatctgaaagttccgtacaagactggctccccatcactcattaatctcccagaggctaccttctcatcctatgtaactctcttatggaagctctcccatagataacaatatacttccccttcaggcagtacatggaagaaacaatgggctatacaatggaaccatcctatgagattacacagaatgagaacctggcccattgttttctcctgctgcctaaggaaggagttgtgctctttggatccctgtacagattttggcttgtccacctccctgaattcccaagtaacaattaagcaatctgcctccttccgtcttctcatttcaatgtgtaggatatttgtcaacttgcccagagttgctgtaggcattttgagctattcatctgactgtgtgcaatagataacaaaaatataattaggaggaggactgaattaagtctgaattttatttttatttttattgcgggggagaggtgcttactttagagtggtaaaagttacttcttgtccaagttttcatcatcccctccttccctctgtgtttcaataaaatgtttccaaagtttcaaataaaaagtttattaaaatagaggccgtgtttttaaaaataaaaatgtaacatcttacttcctagaggtatctgaagaaaagcactccaggagtataaagaataaactagatggttggaatgtggtttattagtccacaaacctgtcaggaatcttggactcttttcctaaagctatgcagacatacaacataactttggaagaaccagttaagtttgtattctaactatgccctgtaatttaggaataactacctgctaaacactgaaaatctgttggtggaaatcatcgggtaaaaccaaagcataagttatattattaggggttggtaagtggttttgtatatgcaataaaaaggattagatggctgggcgtggtggctcacacctataatcccagcactttgggaggccaaggcgggcggatcacaaggtcaggagttcaagaccagtctggccaatatggtgaaacctagtgtctactaaaaatgcaaaaattagccaggcatggtggcacatgcctgtagtcccagctacttgggaggctgaggcagaagaatcgcttgaacctgggaggtggaggttgcagtgagctgagatcacgccactgcactccagcctgggcaacagagcgagactccgtctcaaaaaaaaaaaaagattagatatttgaagaaccatgggatgggtgtcccgttaactgtccatagggccaaggaaaatggagaaagatgaatttgaaataaaattctctaaaaatagctgaaaaagaaaaacttagatatgtaagtgttttatgatgtgaacattcaatgaacagaggaaagagatgtgcctaggaatgtttggtgttgaagatatttacctttttaataaaagagaacaaattaaacaagcagtcttcctttcttgtaggaactgtatttcagggtaattacatggctttagttgctgaaggaaagatcttccttatagaaaaatgcctgctgtctgggtacagtggctcatgcctgtaatcccagaactttgggaggccaaggtggacagatcacttgatcccagaaattcaacaccagccttggcaacatggtgaaaccccatctctacaaaaacatacaaaagttagttgggcattgtggcacgcgcctgtggtctcagctactcaggaggctgaggtaggaggatcgcttgagcctgggagtcagaggttgcggtgagctatgatcgcrctgctgcactccagcctgggtaacagagcaagaccctgtctcaaaaaaagaaaaaaaatttcctactaataaatgtggaaagagtggtggaattagaaaaacatttcataaactccaagtattgattcaggaaaagatgataaagtttgttacacctttaggtgaatgattaatgaaactgaacatccttgtaataccaaagtaacattgcactgatgactgtctaattgaaggagaaaaagtaactgtacaatggagagatgagacatatcaccattctaacttagtggtagattttaccatggctgatggtcagtcatatattttgccttctgatgtgatggaataggaagtacacatcccctatggtatattcaagcctaaaatgtttaacttgaatccagaaatccttggatatagtgtccagtttataagaaacacaggggatrgagaatcaagctaaatgatacaacaagaaaacaaccagacaaattcagaggttgagacattctatctgataactggcctgacctcttcaattagtcagtggccttaaaattaaggggaaggagtagtcatgctagatttaaaacagcttaggaacatacagccaaatgcatttcatcatactggattagattagggttggagcaaaccaactataaagaacatttggggtcagctggggaaatgtgactatgggctgggtattgtttgaaatgaaaatgtaattaaatgaaaagatggagattattgacttgaaaaagcagaggactaccaggaagtaccatatctcattttgattaaaaaatacacatgctgtatgtatgtgtatatgtgtatgtgcttatgtatctgtatatacatatgatcatacatatgcccagaaaaagacccagatgcataaactttaagagttcaacattggttatatctggtagtggaagtataatcattttgtttttaccagtctgtattttctaatttttaacaatgaacgcggattggttctataataatgaaaggtggttttttttttttaaacaaaaaaacccctaccttttcagatagaaaagcagcagtgtattctttccttcaaggaaaatgaaaatgtttccttggaggaaagaagatataaagactagaaaacactctagtatctttaaaaaccaccaagctttcaaatacaaagatttaacatatgtaaactgtattgtacttcatttgaaattcagtatctttactaaagagatttcttttatcctatcctacacacrtacagtattatttaatgatgtgcacacagaactctgccagcctgaaacagtaggtctaagacacgtttgttgtttttggctcccctgtgttgatctaaatcactgcctagtagcccttggaaatttctatcccaaaacgtcccacaggtgcccaataccatggattctcattccccaagttcattctcactcttctctcttggttgagtcttgcctttcttcactctgttccctttccttgttcctgccatccaaagcttctctgtctttcaggctcatctcagatttcctctctttcctgaaggctttttggattccttccatctccatgcacagtcagaagggctctgttcatctctgaatatctttcgcactccattgcatctggtttaaatcccttctctgcctcttattagctatgtgatctcaaaactcaatttctttatctgtaaaatggtgataataaatgacttcgcagggttgagggcctcaagtcagtggcgagtactgcagtagaggcagaatacatagctcaacagaaattactctagtaatggtcatgattgtttgcacttctctcaaaccacctactcgtatattagagtgcattgtgcttgtcttatcctctttactaaaagtaggaaaatggcttgagaattgatgctcagtcttatttatattattctatccctagttatgtgatacttaactgtattgctcggtatttagcagcccattatctaatcatwacatcaccctcattctttctgagcttgtttcctttttgtgaaatggggctaccattcaatctcacmgaattttttttttttttttttgagacagaatcttgctctatcacccaggctggagtgcagtggggcaaactcggctcactacaacctctgcctcccaagttcaagtacttatcgtgcctcagcctcctgagtacctgggaatacaagcatgtgccatcacacccagctcatttttgtatttttggtagagacagggtttcgccatgttggccaggctggtctcaaactcctgacctcaggtgatccacccacctcggcttcccaaagtcctgggattacaggtgtgagccaccacgcccagccaatctcacagaatttttataaagtctagacaaatttttattttaaaagacttagcacagcccctgacagcgtaggcactcaataaatgtggaatctgaatcttacttaaagctagtttatattttcaagtcttcttacttttactaatgctgctttaagatatattctrtaagttcaaatgtaaagttctagattgggaaagaatttataatgtgtctaataaagattgttagagacaaacttttagactgaaccaatctactattaatggactgatgaatcttaccggaaaataaacataaaatatactctgtgttgcctgtggtttaattgccatcaaaattaagtttattatgtactgatttcacagttacattttattttcagtcaaatatctatttgttggtgtgaagaaaatatgtctacttccgctaagtgaactttaaaaatttgtacttgcttttgaagattccatactctatataccgtctcttcctgaagcgtatttatgtagctcctgttaacataagagcgataagagtgttgcttgatgactgctcttattgctttattaaagtgtcatgtaagatttaaatatttgattataagaattcataatataattttgaaagcctactctgttccagacgctgatttatttaaatcatctctaattctyacaactccgaaaagataagaaaacagagatgtgacaaggcttgaatgcaaacccaggtctgtttgactctttgttcattttgaataaagacaaattactcaaagctttactgccaaaaactattatctggttccacattgaaaccctattcaatagttgttattattttcttcttttgctttgaataacctcccagcattgttgtgagtttcaaacgaaataaaaacactatacagatccaaggtgtttttttttagagtattgttacctcaaagtagaaattttcaaatagtaatgttatcattttcttaagagcaaggaactttgtcaatagaaacaaaaacatcataccagaagaaccccagaatgctgggatgactcatgaagaatctgtgaatgaggcaagagaacattcgtcagcaaaatgactccgtgaactgatgttcaaatattatcaaattttaattaccgagtcataattgagtacttactttgtagagagcaccatatctaaaccctgtggtgaatgatgacattttcataggtaattcctccacattaagtgattcatcatagaaaaatgctttcatgctgatgacttccaccatgactgttggcattaaggatcattgacctgaagaactgatttgaacgtcttactgcatcattttaatgagatagagcatcgtttggagctttggactgggaatcaagaaacctggtttctagctcaaactctgctgctaatttatctaggtcatgctttgggcaaatcatttcattcctctggaacccattttccttatatcaaaaattaagagttggaatatgctaatctccctcctattaagtttcgtgagcccgtgatttcaacagtacgtaaatttcctttagtacagtcacagaactggtaagtgacaccagctgaaactgagtgcagctcygcggctctacgcttgctgtagaacctttgtgaattcccactgtgcttcaccagtgacaggatgtgctacccaataaatctccatataactgatcttgaaaaattcattgataaaatctgaaaactgaaaaagatacatgttttagaggtttaggtttcccacaacatgaaaatgtgtcagttgataatatagttcatggtattttactatgctagaaaacagcttactagagaatttcagatattacatgcaacgacaagttaacatagtttaggtgggacgtctttggttcaaagttacagtaatttcaaaagtgtttagttgatccctagaaagtggttaaacaggttagtctctttttcaggtattagagggaagttaacttttgaagctgggcagaaaaggaagttttcagttggttttttccttttgagacttttaatttatcatcagacactattttttcagatgaaagtgccttttatactgtcacctaggtatgagtcaagtatgaaaaggaaatagtaactcaggatcagaacatgaataagtatgcaatatggagaatttccattaaattttaaataaatgaattacagtcatattattcagtatctcaacattaaaactcaaaaagaccttaaggattattctgttttgtggaaagggctttttctgattctagagatgagaaatgtggacccaaagagttgacacagtaggtttgtggctgagccaagacaaaaacgtaaaacctaggctttctggctccaatgtcagtgttcttttctactgcttctgagttaagaagacctttttttttttgataccaaagatacatttactggagttattggcttctttttttttaagacagggtctcactctgtcacccaggctagagtgcagtgatgcgattacagctcactgcagcctcggtctcctgggctcaagcatccctcctgcctcagcctctcaagtagctgacactacaggtacatgccaccatgcctggccaattattttatttttttatagaggcagggtctcactctgttgcccaggctggtctccaactcctgggctcaagggatcctcttgccttagccacccaaagtgctgggattrcaggtgtgagccattgcacctagcagcattattttcctttaaatcaaaataatataattgtttaatataattatgtccataaaatatattacttttgaaaatctgaacaaaattacagtttttggttaaagaagaatggatttgcctttcaaaaaaatgatacacgagagactgaggcaggagaatttcttgaatctgggaggtggaggtaggttgcaatgagcctagattgtgccactgcactccagcctgagggacagagtgagaccctgtctcaaaaaaaaaaagacacagctgagtgtggtggcgagcaactgaaatcctagctgctctggaggctgaggcaggggggtcacttgagcccaggagttggagactagcctgggcaacatagcaagaccccggtcaaaaatttttttaatttaaaaaattttccaaaaggggcacagatacattgaacattgaccttcctttgtctgcttttatgggactatccggcttgttgtgatggttgtggtgaaatttacatccaggatacaggattatttgttcttctcaaaggagtgtcccattggcccagcatttctctcatgttgtctctcccctgggactatgaagaaaccctgaactgatgcaaccaccacttgaaaataaagttccaagccaatctgaattgcactaggaaaaggcagccattcttttgggtagggggagaagtgagcttggctggtcattctggttgttagcaattatctggcttccgtgggagcatcatccagaaatttacatcttattgaaacaagaagaaaatggatgctattatcagttcgttaggtctctaaactccttcttgaatgatacatgtgatatggatgtgctgttctttcattactctcatcatcarcaaaaacaatatgtgtgttttaatgccaaccagggactctgctaggttctagggatgcaatgagatctaaatgcttaaccttttagaagctagcataaatgttagtagcacttacagcattaaatgaagcagatttttaaatgaggttatagcaaaagaaaaaaatactgtacatacaattttataccaatactaacatagcttatttcacacaaaagaaaaagctatttaagcaattttaaaaattcatattcattctagagaataaattccaaatttatagcaaaaaaagagtgaagttttcattagctttcaagaataatgcaggctccaaagtatttaatattctatattatgggaatattttatgtaagtcatcccaacaccaagtaatgctaaaaataactttatataggttcaataccatgattttattaactatagatttttagaccttttcttactttttgttattgaatcattcacagcttttattggttgaattgccttctcctaaaagtaccaaagtgtgaagagtttttatggctgagtaatattcagattcttgtagccaaagacaggttctgtgaagtaatattgaagactaaatgttgaagagtagctttctctaataccaagcggtcaattttttcaaatatcatgaactggggtagagttaagttttcatcctcctcattatagaatcattcctcattatccccattctttctcctgctgaggatgtggtggtgtactcaaagtcacatccatacccttctgtctccaaagtcctaggagagatggccctcttctcaacctctrcattgcacagaaccttacatccctcaacagaaggagtacatagtgcataaggaaagtggtcttttaccactcctcctcactctgtaacattaccaaggactatcctgcaaggggaccatccataggatgaatagcaatagactgctgcattgacgtgcaaagtgctgacaacccattggtgtacaaagcaccctaagcaagatctaaagttctaagatcttatcatgtaaatcaccagcatgctgttttatgtatcttattgtaatatccttccaatcagtattataaagggcaggacactgggggaatcttaaggctttgaagatagggatagtcacgtgcatgtcttataaattctctgatgatcatatactgtttactggtagtaatgactgtacttaaacaaatatattgtttctcatatcattgcatgccaattgaccttcaagtttaagccaatgaaaagatcactcttttaagtatatttggataattttgatatagttacatgtgaactcattaagtatagaaaccttggcttattatttaccacctaagcctaggtcagtacctggtgcttagtaggtatttgatgaatgatgggatgaataaatgtggaaataagtcttttcagtatctaaagacaaaacagatacataataagatacaaatgagattggctcatctatctttattttcattcatttgaatgtccatgtaagcaagttatttcttaagtgacccagcactgcagtgcaactatcattaacataaaatatgattaaataatccacattgtataactgttttgttagtaatgtagggatgctttgcgtgttgcttggtttgtgtatgctgccaaaagtgtaagcaacatttactgagctgctatgtggcaggccctgtgtttattaaaattgtagtttttgctaattgactgttttttgacacatccgtcttgttcatcattgtctacctagcacctagctttaggcttgccacatattatattggcaatgaatatttgttgaacaaacaaatgcatgaaatgtaatgagtaagacaggttttygctttcaagtaaaacatagtctgggggaagacggaatgtcagaatgtggtgggtgctataggagtaggtgttatcagattctgatgctatggaataataaattgttaaaatatgtaatcttatgtttcagaagctaaagcacagtatgggaactattagaggcttagaaggcctcactacccactagactcagaagttgaatagtgtctgagaaaaaagagaatagaagtaacagtagatgaagagtccagaagtgagaccctttgaggacatgaggacaggtggaaggactgcatctgtgtgttgccaaagagtaacagagactggtataggacttgagttcaattcagtcatatccttaagtattgtgccatcrtgtctggattactttgtagtataagtaaatttccaagcatggggaggaaaggagaagctcctttattgagaattcaactgaatatagagaaaactaattttacacaactgtaatcactgtagtcatttggacaaattagcaaacccaagttttgctttaacttggattgccttaataaagatgttttggggcttaatggcacagttgctcaactcccccactttaktccrtgatgttcagacccagccagcatttccccatcaggctcttgcaccatgattgacagggacacttttactagtccccttgaagaatgaatagttactcaatggagattaaccagatatatatttattttactcagaatatcacgataagtataattcagagaattattgccttctaatatactgccctgtgtgggggcgtctttgaaagtccgcaaagtcactgcaattctaataggccactcatgtgacaagacctgctcccacatcggtaatttggcacagctagtatttctccttgccaaaaagggcaaaggccttgagcaagaagccagctttttcctgattacaaaactgaccacaattcctcgccaacctaacagcgtaagtctatttttttctggtggtgtgttattcttctcatagagaactccattttttcattatgacatagcacttatygtttaaacatcaattgatgttcaracatcagctggtgtaacattgctgcagttgctattgatggataagctgaagtttttaagaaagcaaacccgatgtataaaattgaaaccatatcaaacccttcttcattctctcagctatttaattttacagaatttagatagcagtcagtatcattttgggcttcacaaatcagtagagtaagtaccttaggaatataacatttcagtagcatgctgataccaacgtttaaactatggatacatatttgaattccaaatttttcttcaaataatgtgattagagattcaaccaggaatagacaccgaaagaaaactttgcccaaataagctttctggtatttcataagcaagagatttaagttttccatttaagaagcaattgtgaattttacaacaataaaaaatgcaagtggatattgaacagtctctgctctgataattctaaatacagtacagttcacgcccctcacaagacactgaacatgtgggtcaccggcgagacagtgtggcaatattttccctgtaatgtaccaagtcttgccaaagcagtgaacattatgacacaactttttgtcacagctggctcctaataggacagtgccagccaattcaagcccagtcctttctgtgtttattcccatctctcccaaatatttggaaactgatgtcttgactcatgggtgtattcacaaattctgttacttcaagtctttttcttttaacggattgatcttttgctagatagagacaaaatatcagtgtgaattacagcaaacccctattccatgctgttatgggtgaaactctgggagattctcctattgacscagaaagcgattccttcactgatacactgtctgcaaacatatcacaaggtaaagttccttccagatacggctattggggacgtgggggcatttatgtaagggtaaaattgctcttgtagtttgtcttccaggttgtgtttgttttaatactatcatgtgtacactccagtattttaatgcttagctcgttgctatcgcgttcatttaaaaacatgttcagaaccttaaaaaaggaaacctaacctaatctattttatctctgtgcatggctcccatttcctgaattttaagcattaaaggtatagttatatccaaaaacaatcctgttcatttttatttcctgagtttgcatagatttcccaagaatacataagggctttttagacttgaagggtcactttttcctcttttcatctcatatgttagagatctctcataactgtttttatccctcttgcagcacttttattcctcttgaagtactctcagctcttttctgttctattttgaaatctaggtattgtgtgtgcacttcagctctcccaaagaattgtaaattcccagagtgtaggaccaagtggtgctctttattagatttcttaggatacttcctagcatagtgcctaatgcattgcagaatagattgtcggaaccttgaaaaatatctgttccaagcatcacattttatgcataaagaaaatgaggtccctaaaacagtaaatgcctattgcaagtgactacctattaacttctcttcagatgtgtcagaatcagatacctccttttcaatatttctttcttggccattgcaaaatataagttctccatttctatagctccttctactggagtttcttagcacagccttttctgttttgtattgtctcgtattgatgtctatatttctattcattttatttttctcttctcagattctgtgtaaaaatagattgttagctagtgtgattcatgttttataatataagtgctaaagcattaaaattaagtcacttaattgctgaaatggatggctttacattttaaccttttaattttcctggaagcctgaagtttgaacatattagtcaccgtttttaaaatataaagctttttaaaaatgagtaagaaaatgtttcctgaagtactgttttattttattacagtaatttgattcaacatgtatttctatcatctaagcctcttaactaggagttttgttttattccataaattgttgttattctgtttttctgcaagccataaaaattgttgctatctttcttcagttattaatttagcctgcctcagggcagaatgtcctggctatactgtgaaatagttcttgagtcaaaatttgatagttttgtctattttgaaagaacatgtctagaatgcagtgcaacaaatatcaacaaataggttaactgagaggcaagtactgtttgtggtaagggatggttatgtgattcaagttarttttcattctgtgctaatctctaattttatgctttgaatttactctgagtttaatttttttgagtctcaatttcctctaaaagaatgatccagtacttttcttcctaattaacatagtgcagaatgaaattattagcaattaaaacattatattttgtaccaataatttaacccttgtcttatagggtctctggctactacttcttcataagcactgtttctctgttaaaaatgtgagytcctaaaggcccaagacctatgattgttactcctattgcattttgtaaatgacctttaaataattactccacctcttccaaaacagacagacttaaaaataaattagctatatgatcatcattagccgaggccagcagagttgaacactgtggagttgaggtatttggcatgggtacagtagtcctcttaggtgctccttcttcctcatcataggcaaagtgaaattgggggtgttgcaaatggttgggtactgctatttaagaaaaagtggcacatttagtgtgaatgactcagatatccaggtagattggtcatattcatgagattaaaaatctcgactacacttagccactatgcccaaagaggacttccatactttttccaaggctccatcattgctgtgacccctttatattattcccctttctctttttatcaagagctcctcaagcaaccccaagtaacctcatgctggctctgaaaccatttccactagtaaaaattggcaagattgaagggaagcttccacaagctcaagctgaatatgcctcctgcttttagtgccagacttagtcctgtgtgaattctacaattttaagtcgttgcaccagagccttgaaagatgatgacacacttgtcctttggagctgattgagcaatggaaatatgccttagagacatgataaatgctgcaatagacaatccttcaaaacgagtctctcctgagataggagtgagtgattgattgcatgccatttttattgagggatacttaatctgtggttacatatctccaggcaactrtatattcagaaacatttagataactgaccaaagttttcacctttccagaagtttaaagggacccatgtagtaccagggaatataaggaccagtcctttgttggccacatatttgctgtgtgaatttaagcacgccatttttcttctctggccttctgtttccacatatattaacagaatacacaggattaatgggaggattaaatgacacaatacttgtgcaagtagatctaaagccctatatggaatttattgctttagccttgtagcgttaatcacttgtggctagaatagaaggctccgtttaaaaaaaraaaaggctgggtacagtggctcacatctgtaatcccacaactttgggaggccgaggcgggcagatcacgaggtcaggaggtcaagaggtcaagaccatcctggctaacacgatgaaaccctgtctctactaaaaatacaaaaaattagccaggcgtggtggtgggcgcctgtagtcccagctactcaggaggctgaggtaggagaatggcgtgaacccaggaggcagaggttgcagtgaggctgagattgcgccactgcactccagcctgggcgacagagcgagactccatctcaaaaaaaaaaaaaaaaagaaaagaaacctacattttaaacactttatggatatggaaaaacaaaaaccgcagaactctttattgcacaagagtaagtggcagttatatgaatgaagcggggcatccgcatgatctcctgtgagtgttttgagaagatgatcaaacttagagaaagcatctttgtgtctaatttttttaaatgatgaaattatttcccactttcattaatattttcctgtgaagaaattgaagttattctttgggcctaaataaaagtgacaattacatgttttcttctcagaggcattgagaaacttggattataatgtttttcgtacactgaagtagaagtccagaaaagatttgagttattgacacagatcttcttttttttttgagacagagcctcactctgtcacccaggctagagtgcagaggcctgatatcatatttcaccacagcctcaacctccctgggcttcggtgatcctcccacctcagcctcactagtagctgggactacaggcgtaccttaccacacccagcaaatttttgtaatttttatagagacaggatttcaccatgttgtccargctggtcttgaactcctgggctcaaggaattctcccgcctcgacctcccaaagtgctgggattacagrcgtgagccatcgcagcctgcccctgaattccataatttcacrtgtaattagaattcaagacctttttcttgaatattactcttgtccatattaatttttttctgagtatggctctagctttatcatttttttctgacttaactctgattaacctcttttttcatcaccagtacttggcagattttgtagatttctaaactctgaaaatcactgtttttctgaaaactgtcatttgtctcatactttcctccaaaattatgaattataggaaacaccccaaagaagtatcatttacattagctgtttacaagaaaatacagggtttcatttttaattttattttcccctactatctctaaggaatacaacttgtcttgaaagctccctgacagcagctatccatttaatctgccaattgcagtataaaaattggttattaaatgaaaaacaattgtatacctctcacagaggttgtcatrtattactatttttgtcagcattctcacttataactctgttaggataatcctgggaaaatttctaaaatcttcatagctctttcgttaggtacatattccttgagacagaggaaatctgagcaaagtaaatttcttcattatcttagatcaacaaaagtgatacagagcttctgtcctgttagctccctttggacgcttaaaataggcactagaggttgtccagtaaatgcttcatatccatctactagtgctgaatatttgtgaaaatataggtgataatgaattagactcgtttgaatggaattaagtttctgtaaagttttaccagattgtcttttttttgttttttgttttttgttttggtaaaagcagttttgcacctgtaactaatttaaagacgaagaaattgcacatgtaactgatagcaactgccatccaactcttataacctcagaatcaagatcacgtggctatttgagtacacagtgttttaaaccgtgtaatttttatttgagcaagggattgccaacacaagatcgaggttcccacaagtggtgaatggcacttgtggttaacactgtaaagcagatttaaaacagtcaactgtcaattgcctacaagggaattattcctcatcacctcatgccaggtttttatatggccttttagctgaccttctaaatgagaaactttgccatccagtgcaaactgccaatagtcctaaaatgcctatctttattatcagtctaataatatttattgagtgccgattttcaaggcaccatagtgaatgctgtgaaatctagacactttttccctggctttcaaagctctttataatccaggcatattttatatattttaccttatttctcaccacattccaggcattggcctgtcttgctctgttcacactaatctctttgtcccaagagtaaggccgacccacccttgctccaagcctagtatgtcttgaaatgcctttcctaattcttccatcttttcaaatcgtccctgtccttcaaggtcagcttcaagtaacctctactccgtgaagcattctctgaattcattgctgttcattgctccctctctcctctaaactgaaaatgtgttcagaatatctctcttctgccgcttccactgccttcagcccagtccaggacaccgtctgtgcctggctgctagtctcttgatggggttttcagcttccatcctaacctcacaacagcctagtctcaacyggtcacccacagagatgatgctcaaatgtgagtcagatccgtcactccacccatagccctgcagtggttccccatttcacttgtaacaaaagtccaagtctggcccctacctcctgccctaccccagctgacccctctggtcttctctctctcttccacccactctgctccaagcacgccggcctccttgctgttccttccacattccagatgctctcctgccttcgtgcacctgccccagctcttgttcctgtccaggaccctcttcctctggcattctctgggccacctctgtcaattccctataatcttggctcaaatcttaccttagagtgagggtgaccttggccttccctatcctaggacaggggaattacatatcctccccattgcccttcctcctctactctacaatttcctatttaaaaagcatttatcgtcttctaacatgccatgtaatttattggtggattctatgtattgcttactgtctgcttcacctccctggaatgttaaccgcatgaaggcagagatctttgtctagtttgttcacccactgatgtattccaaatacctgaatagtattgctcattaatacttgctaaatgaaagaatagaatcctctaacacttayggcttctatcacacaatttagccctgagttcaaactgtctggtattatttcctgttttatgtattccctaagccaaatcatatagtcactgaagaaaagatccatgttttattctatattccacaaatgccaaacayataataagtataatcaggtcttgttgacttattaataccaagctgatctcctaaggtcagagactggaatatatttagcaaataaatacaaaattttagtgtatgttaaatattattctaaaaccaatgctaatataaacaaaccaagtactggatatgctacaaaccaggcacaaatatgttttgaattatctgttagttaatttgcaccgtgtccctccattagtttgagtagcattcattgaatatcatttgaatattaatttaaacatcatttgtttgtgagttacccaaatccctggcttcttctgcaaatctacccaccttttgatacttccattatttatttgaacatccaaaacacttatttgctagcaatgtttaaaaaagagtagcttatttaattagctaatatctaatatatgaagcacttaaagtattaattgcctgatatgtaataggtgccaaacacgtcagttctgtcttcttctcatctttaaaatggaagttaatacagacataatgtctccccttgggtcttttaagtcagatctttaggaaaaagtaaaatattctcattattcttattattttgcttgcattagcaataaagtatgcctgatttaagttcactggacattatcttactattatctatactttacctaaagccctgcctttagttttgtaaataaaattatagacctattagatagattgagcaagtttgcttagtggattaaaatatgatgctaataagagccaaagtgagtttgataatgggttggccagatttacacagaagtctttgccatttacaaagagttctgtttgccattgatacagtcacatttctagccacaattacccaagatatgtaaacagttaactcaggagaaaccaactcaattttcaggtatatgccatatacaaaatctcatcacctttgctattatatacacttagtattatttcttaagcaatatcatgtaatataaggggcacgttgatgacagggacatgtacctttttcttgggatttcaatatgaatgaccatccaaatcttgatcatcccaatggctccacataatttggacaccatgtctaccagaaagctatccctgattatttcaggacatgttagtatctttcttttccacatttctaaagtacttactatctctatcacgagtctggtctctgtacttccttctgctactaaacatctctcaccttggtaagcttctcaagaaccacaatactatgtgtttcttgtaaggcctgaaaaacaccttgcacgtagtattaggtgattagctatcttgatttaaggttttagattactgattgaacatttactgagctgaagatatagagaaagaaaaatgccaaagaaaataaaatgaggaagtttggaaaagagaaacacactagtaaaatatgatggtaacttctaagaagcaaggtttataaaatagattgttgatacaaagaaaacattataaaaaaatgggtagcttgaatggatttaacccccaactttatttaatttaaatggaatgcctcaaaagactactcagctgatccaaacatagtaacttcccaaacacaagactcttgacgtaggcctcagaatttggggaaaaaaattcctgcattgtttaaaaatacagtgtccttgtaaagcagaataggccttatatacaagccaaatatatcagttctaaagcaaaaacaaaacttttcctacttactcttttatttcttttttttttttttttttgagacagagtctcactctgtcacccaggctgaagtgcagtggcgccgtctcagctcactgcaacctctgccccctgggttcacacaatcctcctgcctcagcctcccgagtaactgggattasaggcacccaccaccacgcctggctaattttgtatttttagtagagayggggtttcaccatgttggcagggtggtctcaaactcctgatctcaagtgatccgactgcctgcacttttcaaagtgctggattgcagatgtgagccactatgcccagcctgcttcactcttttagataaaatgtacaccctttgaatttttacttccgccatttacactgatttgaagtccttggttgaatatgtatttagccttcactgtgcaaggaagctggttacaaaaacagatagtttattaaaatacttgtgttggtttttaaaaaagaataattttaatacagtttttctcttctttctttttgctctttttgttattttttaatagagacacggtctggctatgttgttcagactggtttcgaactctggcctcaagtggtcctcccatcttggcttcccaaagtgctgggattacagatgtgagccaccatggctggccttaatactgttttatgagttctgaattgaataatttttaagtgaatgtcctaaaattctatgacaatccttttaacacaactggaagagtttttgttggcttacttggtttgtctgcatgtttccttctgtcatcccccactcctaggacccatatggaacattctctcttaattaactcttttattgaagtataatrtacttagaggaaaaatgtccaaatcattttcacaagtgaacatacttgcgaaattagcacccagacaaaaaaaaaaaaaaacagaacaataccagcactccagaagccctctgactattctaatttctaactcattgttaagttttgcccagttttgaattttatataaataaaattacacattgtttactcttttgtgtctggattcttttgcttagcatttattcgtgagattaatcacactattgaatgtaattgtacttcattctcattactgtatagtgtttcattgtataaatatatcacaacatatttatcctactgttgatgggcattcagatggttttcagtattgcaaatagtactgctatgaacattgtcctgtaggtctcttagtgaaggagcgtatgcatttctggtagctatatgcttcagccaataatagagtatgttgagcttcaggagaygttgccaacagttctgaacaggactctagaaatctatacttctactagaagtgcatgagtgttctagctcttctacaccatcactggtacttggcattctctgtctttttcacgttagccattctgrtgggtgtgttggtatcatattctaattttaatctccccttttctgatgtctaaaaagttaaacactttaaaaagcgtttgttgtccatttggctatcctttcttgtaaagtacctgttcaagtctttcacccatttttatattgagtactttaggtaaacgttctaaagcataccttgtcagatacatgtattgtaaatatctcctcttactctgtgtgctttttcgtttacttaataaacagatatttctaatcaatatagtctgatatactagatttttcttttacagtaagtgctttttatatcctttggaagaaagctttgcctactccaaggttgataaagtgtgtttttattttaaaagttttctggttttatatttcacatttagatccataatccacacagaattgacttttgtgtatgttgtaaggcaagggtttatctctttcatggggatatccagttgacctgcttcgtttattgaaaagatcatcctttgcccactccccagcaktgacatttctgtcataaaccaggtgaccatataggtctgggatttattctggacttactcttctattgcattgtatttttgcaccaattaagattgccttaagtactgtaactttataaatagtttgatatctggtagtataaatcctccagcgttgctcttccccttcaagatttccttgccacttggcctcttgaatttccttataaattttagactcagcatatcaattaccacacaaaagtgccgagattttgattggaattgttctgaatctatagataaattgggagataattgaaagctttacaatattgagtccttcaatccatgaacatgaactatcctttcacttatttattctttaatttttttaaatagtatatttgagttttcattatggagatcttacacatattttgttagattttttcccctgggtatttgattgttttaatgctgttgcaaaaataatttttaaatttcattttctacttgttgctggcttatagaaatataattggtttttgaatattgaccttgtacccagcaactttgctaaattattttattaactataatgagtttttttgtggatttttaaaaacacagtctgcctaacatggtggctcatgcctgtaatcccagaactttgggaggctgaggtgggtggatcactttgagctcaggagttcgagaccagcctggccarcatagtgaaaccctgtctctactaaaaatacgaaaaattagccaggcatggtggcatgcccctgtaatcccagctacttgggaggctgaggcaggagaattgccctaatgccagaggtggacgttggagtgagctaagataatgccactgtactccagcctgggcaacagagtgagacttcgtctcaaaaataaataaataaataaataaataaataaataaaacgaacaacaacaacaaaatacagtcatgtcatctgtaagtaatgttagttttagttttatttcttcttttccaattattctttgtctttttcctttgttgcattggatggatttccagtacagtggtgagtagaagtaatgatagtatcattaccttgttgctgatctcaagaggaaggctttaaatatttcaccatcaggtatgatggctactctaggatttttgtttgtttatttgtttgttttttatagattttctttagcagactaatgaagttccctttccttcctaagaggttttttatttaaaaaaaaaattatgagtgaatgttgaattatatcaaatgctttcatagtttgttgtggtggtggttgtttttgagacagggtctcactttgtctccaagctggatcatggygcattgcagcctcaacctcctgggctcaagtgatcctcccacctcagcctcttccagtagctgggaccacagcacatcaccacacccagctaatttttaaaaaattgttatagagacagggtctcactgtgttgtctaggctggtcttgaactcttargctcaagtaatcctcccaccttggcctcccaaagtgctgggattacaggtgtgagccactgtatctagcctagaatattttttatagtgctcaggagaaagattaaaagtatgaaaagtgtctactatgtatactttaatatcatattgtaatacatttgaagatactatatggtataactaatgaaaatcttcaaatcagctcataaccactagagatctggctgtatctgttttgacacttttgttctcagtatctgtttagcttaagacccttgtcttctcattaagagtgcttgacacagtaagttgaaaacataatttcaaaagagcatagagtgtcacatggttttgccagactaaacaactctgagtaagaaagtggctttccccctatggtaatgccaagctactagaggaccttcagtggtaaagtatgatttaaaaccctgaccccatctgtcttttcccatttgcagtaagtcctttatagtgtttgaaggtgggcacagcagggaaacagtactctggcagatctgcggtggctccctcctttctgagtcattacacactcttctggatcattcctttcatttttccttttcctctcctctcccctattttcattcccctatcactgcaaagccaaaaccaaaacgtggaaggggacctagccgaggaaaacattccagcttcttttttctgatctaaacaccgttcttcttcttttttattttttaattaataactttatttttagggcagttttagtttcagagcagaattgagtaggaagtacaaagagttcccatatacttcctgtcccccaccacgcacaatctcccccactatcaacatcctgcacccaagtggtacacttgttacagtcaataaacccccactgacacatcattatcactcaaagtccatagtctacattaagattcactcttcgtgttatattctctgggtttgtacaaatgtataaggacacatatccaccattgtagtgtcatacagaatattttcactgacctaaaaatcctctgggatccacctgttcattccgttctcccccaaacttctgactaccactgatctttttcctgttttgatagttttgcgcttcccagaatatcatatagttggaaccatacagtatgtggccttttcagtttgacttctttcacttaccaatatgcacttaaggttcttccatgtctttccatggcttgatagctcatttctttgcagaactgagtaatatttcattgtttggatgagccatagtttatccactcagctactgaagggtgtcttggtgcttccaagttttggcaattatgaatagagatgctataaacacctgtgtgtgggttttttgtggacttaagttttcaattgatttgtgtacctaccaaggagtgtgattactggattgtatggtaagaatatgtttagttttataagaaatggccacactgtcttccaaagtggctgtaccattcatcagcaacgaatgagagtttctgttgctccacatcctcatcagcatttggtggtgttagtgttttagattttagccattctatttgtagtggtatcttcttgttttagtttgcagtgctctcgtgacatatgatgttgaagatcttttcacatgttcacatgccatctatatatcttcttggatgaagtgtctattcagatattttgctcatttttaaaacagggttattcactttcttattattgagttttaagcgttctttgtatattttggataacagtcctttatcacagtagtccctgacctttttggcaccagggaccagtttcatggaagacagtttttccatggactggggtgggcaggaatggtttcaggtgaaactggtccacctcagatcatcaggtattagattctcatacggagtgtgcaacctagatcccttgcgtgcacagttcacaatagggtttgtggtcctatgagaatctaatgcagccactgatctgacaggaggtggagctcaggctataatgcttgcccatcagcagttcacctgctgtgcagcctgattcctcccaggccatggactggtactggtctggacctggaggttgggaacccctgctttatcagatgtgttttgtacagatacattctccccatctgtggcttgtttactcattctcttgacactgttttgcacagagcagactttttttattttaatgaagtccagataatcagttatttcatggttcatgtctctggtggtgtatctaaaaagtcctatccgtgctcaaggtcatctaggttttctcctatattgtcttcagggagttttatagttttgtactttacatttagatctatgttccattttgagttaatttttatgaagagaataagctctgtgtctaaattattattattattattgttattattatatttttttgcatgtggatgtccagttgctccagtcccagttgttgaaaagactgtctttgctccagtgtattaccctggtttcttcatcaaagatcagctgactacatttatgtggtcctatttctgggctctgtattctgttcctttgatctatttgtctattcttttgccagtaccgtactatcttaattactttaactttctagtaaggcttgaagtcaggtaatgtcagtccttcgactttattcttcttctttaatattgagttggctattacgggtcttttgcttctccatataaactgcagaaccagtttgccaatatccacaaaataacttgctgggattgttattgtgattgcattgaatctatagatcaagttgggatgaatgacatcttgacaatactgagtcttcctatccatgagcatgcagtgtctctccatttatttcattctttgatatctttcatcagagttttgtagttttcctatataggtttcatatatattttattaaatttatacttaagtattttacttttcggggtgctaatgtaaaacaaaacagacattatgaggaaaatgtaatgtctgtttgggggtaatgtgtttttaatattaaatttcgcttgttcattgctggtatataggaaagcattatgacttttgtatattaaccttgtatcctgcaaccttgctataatcacttactaggtccaggagattttttttttttctgttcttttggatttttttatgtagaagtcatgtcatttgcaaacaaagacagttttatttttaccttcccaatctgtatcccttttatttccttttcttgtcttgttacgttagctaagacttctagtatgatgttgaaaagcagtagtgagagaagatatccttgccttattcctaatcttagtgggaaagcttgagtttctcaccattacttaygatgttaactatatgttttgtttgtagatgttcctaagtttaggaagttttcttattttgtcaaattctttttctgcatttattgatatgatcatgtgatttttcttctttaggctatgggtgtgatggattacattaatttgttttctaatgttgaaccaaccccacataccttagctaaatctcacttggccatggtgtataattcttttcatacrttatcggattcaatttgctgatattttgttaaagatttctgcatgtctgtccatgagagattggtctatagggtttattttccttgtaatgtctgttttgttttagtattagggtaattctagcctcattgaatgagttaggaagtattccctctgcttttatattctgaaagagatttcagagaattggtataatttcttccttaaatgtttggtagaattcaccagtgaacccagtccggtgccttctgtttcagaaggttattagttattgattcaatttcattaataaatgtaggcctattccatttctctatttcatcttgtatgagttttggaaaattatgtctttcaaggaatgagttcatttcacctagattatcaaatttgtgagcatagagcctattatcctttaatgtcaatgagatctgtaatgatacccctctttcatttctgaataactttcattcattcttcacgtactagacaaagtagaatttcaactaaaccaaagcaactgttcaacagatttagccttagtcctaatcagattattagtaatatctccctttagaaatatatgaaggtacttttagcagaggaaccaagcttgagctagtttgaccataatgaatttttgctgaggaagcagaagaaatgtttatattggtgagggcataatcctgtaatcttttctgtgtcctgatacctcaggaccagcgtaagcaaactccctagacaagatgtggctcatgcaagaggaaatatgcttttgaaaatgaacatgggccaagcatagtgactcatgcctgtaatcccaacactttgggaggctgaggcgggaggattgcttgagtccgggagtttgagaatagcctgggcaacataatgataccttgcctctacaaaaaaaaaaataaaaataaaaaaataaaaataaaaaaattagatgaatgtggtggtgaatgcctgtggtcccagctacttggaaggctgaagtggaaggatcacttcagcacagggaggtcgaggcttcagtgaaccataattgtgccactgcactccagcctgcatgacagagtgagaccctgcctcaaaaaataatagtaaaattaaataaaatataataaaaaacatggtctttctaataccctttgttgatctgaatttgaaaatttcctgtgagaccttctggcttattataaagaaatttgcatctaaagatacatattggaatgtttcaatctcaaagctatcaatgggaaatcaaacttcagaaacattgaatttggttttgaatatagtctaagtagacaataaaatgaaaatacatttgtttatattgaagaagcaaatgacacaccaaatagttaatttctaatagttttcatttttttctttttctttttttttttttttttgagacagtgtcttgttctgttgcccaggctggagtgcactggcatgaactcggctcactgcaacctccatctcccgagttcaagtgattctcctgcctcagtctcccaagtagctgggactacaggcctgcgccaccacgcccggctaatttttgtatttttggtagagacagggtttcaccatgtaggccaggctggtctcgaactcctgacctcaggtgatcctcccaccttgtcttcccaaagtgctgggattacaaacgtgagccaccacgcccagcctctaatcattttcttaattcatggtgcccaaaataaaagattctatattcagagaaaccatgacagaatttaaactctagccccaatacctatttaacattgggcaagtcacttaacctttttatgtctaatatttttaatctgttaggtggtaataatacttgtgtataacaacataggactgtttacaacaagcacttaataattgttagctattgttactaaattgtatttctgctgatgggttccagagtcttttcctccttcactaaacaaaactcaggatactatgtgaaggaaaagaagtgagttggtagaatttattttttaaatgcttgagtcaaaaggagagccatttgtggctgaagcatcaaaaccattttctgattttctttcattctacttgaaactacattaaaattttctccaattttccagatgattgcatgataattccttttaagaggactttaacacatgtaagaaatagagttactccctctgttaggagaaatcatggaaagatattrtaattaaaagatagtgaattttagcttaatttttacctttatctaaataacactcgtacacagctacagctttcagtgaagaagagatactcattcccacagctaaatcccgctcctcataggcagtgattttacctctttcacatatttcttctggcatttaccttcctatctctagaataacatacttamattaatggccaggcatagtgactcacgcctgtaatcccaacactttggtaggtcaagatgggcacatcgcttgagcccaggagtttgagatcagcctgggcaacatggtgaaacctcatcagtacagaaaatacaaaaattagccagcagtggtggtgcatgcctgtggtcccagctacttgggaggctkaagttggaggatttctcgagcccgggagtttgaggctacagtgagctgtgattgcrttacagcacgacagcctgggccacagagagagaccttgtctcaaaaataattataataataataacttatactattatttttaaaattgtattcttatccattgacttcttactgtgggagataataatttagtccttttactaccatattcccttttccaaaacacatacttctccctcccctccatcttcacaatgtagttacttgtaatttggggttaaatcagttgtctgtgcttacattgtagtaactgaaagtgctgcttaaggttgagccaagcagtgtgctmtgattctgtttcctctcctgcttagctatttacttttctggagttaatttttgtcacttagtcattgctcattttgttgtcatttcttgctatgtactcatcactaattcatcctcaaactctctgacagagtaataaaaactcctctgaaagtggtcagacatatcgggcattctggtttctcaggtgatcccacctggccttcttcctcctgcattttctctaggctgctctgtatctgtagcctgggactaccttccacctctctcctgtctttcagatcctttgtttcctggtcccatcttttctcttcttggttctggtggagaactctgggaaagagtacgtgggaggtaacttttctggatgccttatcattctgaaaatgtctttactctcatacttgatggacgatttggatgagtctaaaattctaggttggaaatttttttttctcttgaattttggcaacattgttctattgattttctagcttccagtgttactgttgagaagttcagtgtcattctgattcctgatcctttctatggtactttttttttttcctgtcaggaagtacttatgatcatctctatagaaggggtattaatcttgacagtgttcctttctgtgtggtttaagaaatcctttctctcttgggttttgttactgttttataaatccttgatcttagtcattctaaggttaaagaaaaactgaggaacaactcaggaatacgtttcaagtacatgtgataaaaggcaaatatgcagaggatgataactatatgtttaaaaaatgggaaaaaagagatagtcgcaaacttcaacataggttagatcatcatttctcaaaccatattccatcacatattaarctcctcaaatattgcacactgtgcttttttctctcttttgtgtattctcgtgaacattagcctgttagtttaagaagtctcacagtaaacctatttaaccttgcttaacctagcattgcctaaatttacttgatcaccagattttttttgttttgtttttaattatttttaaaggaacattattaacatatgtataacacagttggggaaatgccagataagacatagactttcctggctgctaaagagcaattaagcattggaatgagtaaccaagaggagctgtggactctccttttccagaggcctttaaaacaggacatctgttttaggcgtagtcctgtttaaacaatagggctttgctggcggttcttcctcttcctgtcccctagtggtagtgttggaggcttttagcccaccttttatatgactgtagtactctggtgactaatgtgtacacaaattactgttatactattaatattaattatatttattgagaacttattaagtatccagccctatggtaagtgctctacatacattatctaatttaatcctcacaacaactctaggagggagacaatattaatattctacagatggagattagatatgaagagatacgaacttccagcaatagggttggattggaacctcgggcatctgacatggagctgtgcccatccttcttcaccgttaatgttcaaaacagcaaacggcacaaagcaagcaaacaacatttgtatatctgtacttactatgtaaaaacaaaccaagataatgcttactttattagactattcaagactattccctacgccttttgattaattcagrgttcatgacttttgttagaaacaaattctgttacagatttagttcttcgcattttattctgtgataatttgccatccaggaaatggttccttacatgagactttttccctcataaatttgatgacattcatatacattcactaaagacccccaaaaaataaatctggatctgtgaaaagtggcaaaggttaaaagtcccattttcagcatatttacatgtagtaacaacttgataacacagcgctgagaatgccaggctcagaggagccaagctgggctccygtccagtcagcctctagctcaccaggaaaccctgagcaggtcactttgcctcattttctttatctgtcaaatgagaactcagatgatctcaaaacagccttktctgctgtagtgtttcaggatgattcttgtctctggatgtcgctgtcatgatgggagaggaattagtaaattcccaggtcagtttacactgcagagtgatcttgatctgcatgaatcagtaaggatgggctggataaacaagttggaaccacagttatgagtaccatgacattaactgaaacaaatgagaagggatkgaaaaatcggcggttaagtgtcttttaaggtcatttccaacaaaactacaaaggacctatgaaaggcttttcaggcacgtactcttgttgcctagctgaacacatttctccaataaagctttcatttgagagttactcttcatagtacatcccctgcccccctgcctgcctggcacattataggtattcatgaagatttgttggaactgttaaataattgtttaatatagaactggaagatcaggaagaaataatgtttttctaaccagtatccagtgtaaagtcacaagtgtgggctatggagcttcagaccatctggattcaatgccagttctactgcttagttactgcgtacttttaggcaagttacttacttccaggtccatgcctcagttttcccatctttaaagtaaattataaatgcacctacttcctcgggctggttgtgaggattaaatgacacaatccgggcacaatatttggcgtagtactttgcacagatttagtgtcctgttagtattagctaatgtaaatatgaagaagatgtaacattttaccagctattctaatcatagcttttcttttcttttcgtaagggacaacataaaaccccaaaggtaaagcatatatttctggtgttcaattttacaatttagcatcttttccaacccacttccatactcccaaataataatgcctatcagattaaagaagttactttatttttgcatgaaattggttgtatttttgttgcactacttcatcctttgagtattgtgaaaagtctgygcattgactataatagcatttaaagccaagtttgaaggtctaagataatggcacacatccatgtcctttgctcacaagttctgcctaaagacttyagcctgcttgaaacactctaaaggttgtgaaattaatggatataccactgatgcaacacaactcagtgtcaccagctagggagttaagacatgttcttgttactgagaagggctgttgttcatgcaaatattttgttcatttgttctttcatgggtaattgcacggagtaacaaaaaacacctcctcaacttacagcttggcagaaacagtagcttatgttttctagagacaaaattagaagcaggctttctggacccatctctaagtcaaaataaaataaaatgtctagggaaccactgtgcctcccagtaactatggtccatggaataatattgtttaggtcaaggtgtcccagagtaaaagggaagggagaagggcaggggggaaggggaaaagtgtgtttgggcaatgttttcatagagatgaagaggcaagctgtttttctttcttactttgtcctttcaacttagaaaaataagaaaaccatctaggaccacaaccttcctcttgtaatcagcaaaagagaaaaaactgaatatacatcgttaaggggaatggttatggcttaagttgtattttattgataatgttgaagattaacattttttggagagaacttaagtcttaacaaaactaaactattgagaaagtattgttatttttccatctttagtagcaaaatgaaaatttactctactcttctgcataaaatatgatcatcaattggcaagaatttggttaaaaaaaaaaactgtgcatagaatatgcacatgggaagatagaataataagatgctgtccttttactccagactggaagtctaatggtggagatagttatccagataattatatctgagttaaaggaggaggtacaaagtgctgtgggaacacagagaatggagtgtttttaagttggaggattcatagatggttttacagagaaagtagcatttggactgggttttgaaagacaaacaggcttgtggcatgaagaggtgaggagtaggaagaagatacagcagcctcagtaacctgtatgactaaaagaggcagggcatgtttaacctgggcagatagtatgatatgcccagccaccagatatgccaagaatgggagcgaggtctgggataaccagtggaaataagactgaaaaagtaagttagggctgagacatagagggccttgaatgccaagctaaaaggccagtgtttctcctgcttttccaccagtatgcccttactagtagaggacagcaaaaccataccattcttgggtggaggaagggaggaatgaataggtggagtatggggtatgtttggggcagtgaaactattctgtgtgatcctctaatgaatgcatgatattatgtctttgtcaaaacccatagaacttggctgggcatggtggctcacaccrgtaatcccagcactttgggaggcagaggcaggtagatccattgaggtcaggagttcaagaccagcctggccaacatagtgaaaccccttctctactaaaaatacaaaaattagcagggcatggtggcacacgcctgtaatcccagctactcaggaggctggggcaggagaatcatatgaacctgggaggtggaggttgcagtgagccaagatcgtgccactgcattccagcctgggtgacagagcgagactccaccaaaaacaaaaacaaaacaaaacaaaaatgtagaactatgcaacagaaagagcaaaccttgatgtaaatcatggactttaggtggtaataatgtgtcaatattggttcatcagttatagcaggtatactacactgtgcaaggtgttagtaataggggaaaaccatgctttgtagagaggggacaggaggctggggaagggctattttaagagctctgtactttctgctcaatttttatgtaaccctaaaactgctctcacaaaagtaaaggctactatgaaaagcaaaacaaaacgaaaacagaaaacagcatccttttagccatgagatgtactacaagtacagagttttctaggaatttcatataatatttttaaaaattacatgaacttttccttctttccttaacacatagatggctattttcacattaaaaattttcccaaaatttccacaatgtaatacacgacccctagggatatgacttttgtaataagaagcatgactttggctgggcacagtggctcacgcctatattcccggaagtttgggaggctgagccaggaggaccacttgaacgcaggagtttgagaccagcctgggcaacacagtgagatgctgtctctttaaaagtgaggttggggaggtgggagagagagagagagagagagagaggaaagaaagcagcatggctgtgattgataggaagtcactgaaattgtatgttaaaaatgaaacaaagcaaaattaaaccagtaaaatcatgagcaaccaatttctctcccaccccagatatttgtgcatccttattttcatttcccagtattcatacaaaagcatatccactacctttaactcactttgtcagcctttattctgtatgcagaaaactttgcaatagcatagtgagaaataggtgataaacccacctttgtggatattacagtgtagacaagggaaatatactttaatatgaaaataagttatactaagaaaagtagatacagaaatgaaaattaagcctgccaaggagacagacaaagtaaatggaatgacctgggttagacaggtttggacgaattttgaaacaaaggacacagttggatgggtgccctgtccttargagcacagacttttttctggatgtcattgagacctagaatgacctttaactatcaccagtacacattcccctttttggtgtgcagtgttgacactgaaacacagataacttaaggttgtttgggtacttatttatgtagatagacatgtgaacccatacggtacctaattagtcctcttgaaaccacaaacgcgcattcacaggaccagtcttgtttatattttcaaggctttttttttttttcttttgagttggagtttcactcttgttgcccaggctggagtgcagtggcgtgatctcagctcaccgcaacctctctctcctgggttcaagtgattctcctgcctcagcttcccgagtagctgggatcacaggcatgcaccaccatgaccagctaattttgtatttttagcagagatggggtttctccatgttgatcaggctggtctcgaactcctgacctcaggtgatccaccctctttggcctcccaaagtgctggaattacaggtgtgagccaccgcacccggcctcagggcattttttcttatgaagatgacagccgaaatcttcaatcttcaactcatgcaaaagtttgcctttggagtgaatttcttggcaatctgcttggtaagaaaaagcaagtggtgttaaagtgagagcattaaaataaaattgctccaaaaaaatgataaataaataaaagaaaagaaaaaggaaaagcaagaggcccatgcacagatacacagaggagagtggcccctcctccataagcctgtttcatcaatgagagaatcaagagagtatgtatatacagaagagagtttcagggtcagtcttgagtttgcatcttctacttcctagctagaggaccttgaacaattcactttacttctttggtcctagcttgcttatctataaagtgggaataatatttcagattatgcagaagaaaaggtaggatgtaccgggcacatgggaagtgcttgatcaataccaatttgcttccctccttccctgccccttctgctgaaacttcacagctatctcattaagtcatcaatgtatttagtatttaataaataaatatttaacgagcacctactatgagacaagccctttgttagccagtggggatatgactgcaaacaagaaagatacgcctatgatttgatgaatcctggagtttatgagcagctcatctctgtctcccgtgtgagcagtcctaaatttacacagctctccactggtgtttttgaccacagagttaacatttaaaatacctatgactgcttttttggcaccactttgaataatgaactggtgtcaggtaaacagagtccaggtacctattgcagaaagttttccagtctgcaccctcggtggctcacaagttyacatgaagtgaaccaaaagagttttgttgcacttactgtgacaataaatcatgtttagaaaaatgcatgtggcatacatgatattgggcaaatgattcatgaaacttgctattctgtggccttagaatccatgtaagcatttttcctttgtcttttatgtgttttcttgtttctatctctgttttgttttgtttttgttttggggatggtttaaaattaatgctgggctagagtctgattttgacactctcgggtgtgatcaaatgtttccacatatctctctaacctttctattctcaatgtggggaaaactttctccgctttaagaaaaggtgtatccacagaaaagattattgagtaatttttcatagtacagaagtaataattgagtgatttttccctttaaaatttttttatttttgtattattttaagaacaaaattattttaggatgcaattaaagaagaagttcatttacctaaatttaatttgccaacttttctattacacaaaagcattataaatacaagtagaatagcaaaaatttcatcctaaagagaaaaatattttgggcttctaatttcaagagagtaaaattgtcctggaaccctgtgcacactttaaaaacaatcattaacagattgcatcaaactagaaacttcttcaccacaaaggaaataatcaataaagtgaaaagccagcctacagaataggggaatctgtacatctgatatgaagttatggattgcaaatcgtacatctgatatggaattaatattccaaaatatgtaagaaactcaacaaactcaattgcaagaaaacaaataacccagttaaaaaatgataaaggaatatccatttcyagaaagaagacatacaagtggccaacagatatatgaaaaggtactcaccatcactaatcatcagggaaatgcaaatcaaaaccacggtgagatatcatctcacacccattagaatggctgttatcaaaaacacagaagataagaagtgttggcaaggatgtggataagagggaacccttgtacactgttggcaggaatgtaaattggtatagtcattatggaaaacagaatggactgcctcaaaaaattaaaaatagaactagcatatgatctagcaatcctacttctgggtatatatccaagggaaatggaatcagtatgttgaagagctatctgctctcccatgttcactgcagcattattcgcaatagccaagatatgaaatcaacctaagtgtcaatggatgaatggatttttgaaaacacagtatatatctgtatatatatacacacatacatatatacacatacagatgtatatgtacacacccaatagaatattattcagccttaaaaagagaaggaaatcctgtcatttgcgacaacagagatgaacctagaggacgttatgctaagagaattaaactgggtggtatttgacacagaaagacaaataccacatgatccacgtggaatctaaaaaagtcgaactcataaaagcagtgagtaaaatggtggttgccaggagctggagggtgagagcaatggggagatatcagccagagtttcagttatgcaggataagctctggtcaccttctaaggtgatcatctgctaagtataggtcaccttcagcatggtgactatagttagtgatactgtatggtatatttgaaatttgctaagacagtagatgttaagtgttctcactacacatattcatactcaaaaaggtaactgtgaagtgatgaatatgttcattaccttgattatgataatcatttcatagtaaatacgtatattaaaacatcacattgaataccttaagtgttttgtttgttttttggttttttgggtttttttgttttgttttggtttaggttttttttgaggtggagtcttgctctgtcacccaggctggagtgcagtggtgtgatctcgccttactgctacctctgcctcccaggttcaagtgattctcctgtctcagtctcccaagtagctgggattacaggcgtgctaccacacccggccaatttttgtatttttagtagagatgaggtttcaccatgttggccaggctggtctcgaactcctgacctcaggtgatcctcctgcctccgcctcccaaagtgctgggattacaggtgtgagccactgtgcctggcctgtataccttaagtttaaaaatttttgtctattatactcaataaagctggacaaaattttaaataaataacagcagtcattaacagactcaattgatgacctaatgtagaagttaatgagagcaggcctgttggcaaaaaggcatttatatggatacactgtatgtatctgcactgtttcaggatcctctattatgatacctgggtaaagggtgacttcctttctatcataaaacagcctagacagcactaagaaggtggttatgttcttttctgttgttgtgagygcccagatgagattactttgccaaagactcttttcatttctctttctgaaactctgtgagattgctgtgttctctaggacttaacttcacagctagtctatttttcctttcagaaatgaccatggttgacacagagatgccattctggsccaccaactttgggatcagctccgtggatctctccgtaatggaagaccactcccactcctttgatatcaagcccttcactactgttgacttctccagcatttctactccacattacgaagacattccattcacaagaacagatccagtggttgcagattacaagtatgacctgaaacttcaagagtaccaaagtatgatgtttattttcacttttcagactactaggactagaattggactcatctctcagtaaccctgtaataaataatgctccagagactagaaatctaatagagaaggcattcaccattcatttattcacccatttatccatgaaatattaggtatctatgaaatgccaggaagggagctggcacgaggtcaatcttgccttccccgccccctccttccttcctctcttctttcctttcttgcttacttccttcttagggacattttctaccttgattacactgtcagttgtatctcaggctaagagtccatcatccaaactttgaattattttggccccttataagttaataagtaacaattccaagtcactttgtattatataacttatcttcactatattactgctactacagtacattttttctagtatgtcctttcaggagtttatactgaaacctacttttaagcacaaatttgttttaacattgtagcctattgataaattttcatgccattaactaaatcaacatcaaaacatcagactcaagaaaaactagaactgcactttttgagataaaatgtatttctgtgatgctatttccttgatttttatcatgtgtgggctgacatgctggttttccaaagccaccactatgtaattggcaatcattacttgacaagtaagaacttcctgtatttctagtggcttttaaagataaataatatgcttagttatatttatctatgcggttttcagttagagcctaatatggaaatttagtagccctgagcccaactagtaaaaggtagggcttacttccataagttccgccacgctctgtcaaagattatttcacaaaccacctcctttgactgaacactaatggtaacctgggctcatatttttcatgcacctcaagctaggcataccatgaccttttcacagtggtgttccttctgtggttcttttgcaagttgtttcaaagtacttataaaatggaatatttaaataaaatgtataatttaatattgtgatgaataccaaagacagaacatttcctagcaaaataagcttccttgtctcaaatcctctatgttgtctgttacagctgtagtattgcaggctactgggggtcatagaaccacagacttaattctcattcccattttatatttacaggtgaggcttagagatgttataacttgcctgtgattacaaacctttctttttcttgccttaactccagtgttttttcatgttccactgtgcttttacactgaaacaatacaaatacagcatgaaggtgtactatggtggcttgccctgttgcctttttaggactgttttcatgggataattatcctctcacatgtctccatacacaggtgcaatcaaagtggagcctgcatctcmaccttattattctgagaagactcagctctacaataagcctcatgaagagccttccaactccctcatggcaattgaatgtcgtgtctgtggagataaagcttctggatttcactatggagttcatgcttgtgaaggatgcaaggtaattaaaaaaaaagtcttcaaagaaattgttgaaactttattatttcatttcagcagaaccccttttttaggtgatacaatatatgaattttttttcttcatggaagagtatcttgctctgtcacccagaccagagtgcagtggtgctatcctagcacactgcagccttgagcttctgggctcaagtgatcctcccacctcagcctcccaaaggatgatataagatttgaaagcctaagaaagtggataaaagttgggctgctttgccccacatttgtttctccaaattgattctttgagacactgatctaatttaatccttgcatcttgcagatttttacaaaaaggtgacttctccaaggtgtcatggcaagacagtgatgacctggaaccaggatgcagatttcctgcattctctagttgtttatttatttatttatttatttattttgctataccgtgtaatattgtatagacagaagattttacagattatttatatatgcatatctttggatccctagagcaatcctataagattggacttctttatggccacattgcagatgtagaaattacaggttagtaaaacttgccaaggtcatcccttagtaagtggcagaccgcagtctagaccctgactccttaggtggtgttggctctcaaagcagtgcctcatgtttccttattccagcatcaatgtgagccacatacacggacaggtaaggaggtataacagtgtgggaaaggagatactatttatcctcatctctttcctttgtgaaaagggtattttggaaaattcagacgtttagtaatttattgcttaattattaagaaaatatgtgaatccactcatattttgatatgcagtcttttaagataattttaatatacacaatgcaaaaatagtactaatttattatatacgcattgcacagaataaactgttcataaatattcactttataaaataaatacctgcttattgggctttttattcaacgtaaagatacagaacaacagttaggaaagttttaggacatcttggttcctaaatggatggtgggccaaaaaaggaaactgatttttattgaattcttactacatgccaaatactgtatgaggtaacgttttcatacatcagtatttaaccacatcctacccaggttttctcatctataaaatgattgtggctgagtgtggtggctcacgcctctaatcccaacactttgggaggccaaggcaggaggatcacttgagcccaggggttcaagaccagtctgggcagcatagtgagaccccatccctacaaaatttttaaaaaattaaccaggcatggtggcacatgcctgtagtcctagcttcttgggaggtttaggtaagaggatcccttgatcccagaagttcaaggctgcagtgagctatgatcataccactgcactccagcctgggtcacaaaagcaagaccctaactccaaaaataaataaataaataagtaaataaataaaatgacactgaattacatgatctctaaagtcccttcaattgaaacagtttttactctaaaggcaacctaatacagtgaaaagggacaaaccagaggtcagctctgccactttccaaagtcattagccagtcacatacacattgtatccttcatcaggccccccatatgtaaaatgacttggttagattggctacacaaggtcttattcatctctaagttctgtaatttcaaaatgacactttgaaacactctggcaagagatgctttcatttaaaacactaaaacccgtycgttctgtaatttaaaccaagttaaaatatttatgaccttatatgaaatcattgtattaagtcagttatctaagatcttgatgagtagtaagaacatgtcattttattgacttagattttttattgaatgttttgtggttttattgagttttattttagatttaatgagttagagtttatttttactgagttggataccatttttgagtgagtaaactgttgctaaattctgagccatatttatctgaagaaaccattctgttttggtcatgttgataatttacaactataaataaataaaaacagcatggttggtttaaggttccacaataagttattgttttttatgggctagtaaagcacttagaaaactaaaacttttaagcaaatagttccaccataatcctattagtcacaaatttgtggaaagctaacattactgaaaacagctgaaaatggaaagacaagaacattgtcagtagttggttatagtgataaatctgagttctgagggcactaaaacttaaaagcaagcagggaagaagagtagcaaaaagagaagagagaggaggaaatccaagtgccttcaacttaggattagaaagggtagaaagcagggagggagaaaaaatacttaataaaacctgaagactctaggggagtccttaacctatcatagattaaaaagcaaacatagaagaaaactaagcgtattgtatactaacctgcagtaatttgcaaaccatccaaaatgtggattccagaattcctagactaaaatgtaaggaaggttttactcccttggaaagggaaaatagacatctacacgttttaaaggtaagaataagaaaaatattattcttggaaaatttaaacatttagtaatatactacttaatataaagaaaatatgtgaatccacttatattttgatatgcagtctttcaaaataattttaatatactcaatgaataaaatagcatttattgtatactgattgcacagaataaatttttcataaatatttaccttataaaataaaccctgcttcggctggggtttttattcggcgtaaagatatagaacagcagttaggaaagaattaggacatcttgattcctaaatggatgatgggtcgaaaaaggaaactttttttgaattcttattctgatttttattgaattcttagtatgtaccagatactatgtgaggtacatttgcatatatcattatttaaccacatcctactcaggttttctcatctagaaaatgattcagatgatattggtaggatgtggttacataatgaaacattatcatttggcttcttcaagtatacatcagcagttcccaaagtgtggtctggggcttggaccctttcaaggcatccatgaagttgaaactatattcataataatgatttttattacttttttcactttcattctctcaggagtgtatgtggagtgttctggaagctacatgatgtaggatgatgacatagctctggtagctaatggaatgtttgcttatgtgttcttgtatataataatttctcagttgtaatttctagtgtgataaatgtcagtaaagatagcccacataaacaaaatctctttggggtcttctataattttaaaaagagtaaagggatcttgcaaccataaagccttcagtctcattctgaagaaatgcagttactcattctttgctactttgaaactagacaaaattgctgccacattctgaatactgctgcattagaccagtggctgtcagtaaagacatctccttagcttataaccaatacgcaataaaaagccaggaaaatggaattagcaaatgtgtttaactcatctgcatgtattttctgagaggtgttttggaagcttcacatttgctgttgtagtaaaatgtgggttatattcataattaaaatacagttgaccacaaagctgcaggcttatctatggattgaaaagaataaacacagcataaaacaacttttggtagatcttcctaaacaattttacaatgtaaatggaacaggtttatattagtgattcttgccaaaaattcagtcagacagatgagaatgagtagattgggtttgaattaaggtgaaatagttacagattcttgggtatgttaatattgcaaacttatgtaaaataaaacctttagcaactgaaagatatatataatttagagcttggaaagctatcatttatttgttgtttacatgttggagatatatttttttctttggtaagttccatcctattttttatctttagtgaaagatcattttggaaccatagccgtacctaaagatataagtaaatacagtctaccatacaatacaatgtaatctaagtttgtatttctgtatacaaaagaatgccgtatgcttgttagccacttgtatgtctattcatccctacttcagaaagagttttaattcttctcacctgccagtcgtagcttattaatccaacttccaggggccagactgcttcatgggaaagccaactgcaagcccagcacagggctgttaatttcattgtaaaatcaacaacaccattctgaggtctcattgtccctgatgttttgttaaaattaaagcaattaaggagagatcaaagaaaatttttcaaatgatatgaaaaatttgtctgttactttctagcagacaaatgtgcagacattagaataaatatatacacaaaacaattttctcagatggtgactgatgcatctctaacacaccacatcacagacttcctgatcatcagaagagtaagttgttgaaaatacattgttctatggactctaaaataataaaaaagtgttattagagtgtttcttcatcagtaatatgaagaaaatttggagaagccagccttgttctgtaaatcgataaataattttacagaaaagcactcgataatatccttacatcttcctctctagattccttgagtcacataacaagaaaacacttggttatcggtgtaaaaaaagtaaaagcaagttccaagatgcatgctaggatctgtgtattcagttcaagattttatttacatatacagtgtataatgttcagaatgattattcattgaaagaccttggatcatcacaaaaaatgtgatacacttttgaaagtcatcagctgagtcatgtcagaaatttccattataagagttaaacttaattctctttttttttttttgaacatgtgtcaaagatttatttaaaacccattaacgagggaaaagcaggatggtaaatctagttcaaagaagaacttgaaggaccaagaatatatagtcactgaaagaaagaatcctgagataagattcagaatggttaatgttctacagggcaataaaaccataaccttgaggttatcttttcttttttttattattcttatactttaagttctagggtacatgtgcacaacgtgcaggtttgttacatagttacacatgtgtcatgttgatttgctgaacccatcaacttgtcatttacattaggtatttctcctaatgctatccctcccccaaccctccaccccctgataggccccactgtgtgatgttccccgccctgtgtccatgcattctcattgttccactcccacctgtgagtgagaacgtgcagtgtttggttttctgtccttgtgatagtttgcttaggatgatggtttccagctccatccatgcccctgcaaaggatatggactcatccttttttatggctgcatagtattctatgatgtatatgtgccacattttcttaatccagtcaatcattgatggacatttgggtcagttccaagtctctgctgttgtgaatagtgccataataaacatatgtgtgcatgtgtctttatagtagcatgacttataatcctttggatatatacccagtaatgggattgctgggtcaaatggtatttctagttctagatccttgaggaattgccacactgtcttccacaatggttgaactaatttacacttccaccaacagtgtaaaagcattcctatttctccacatcctctccagcgtctgtttttttcctgactttttaatgatcatcattctaagtggcgtgagatggtatctcattatggttttgatttgcatttctctgatggccagtgatgatgagcattttttcatatgtctgttggctgcataaatgtcttcttttgagaagtgtctgttcatatcccttacccactttttgatggggttgtttttttcttgtaaatttgtttaagttctttgtagattctggatattagccctttgtcagatgggtagattgcaaaaattttctcccattctgtaggytgcctgttcactctgatgatagtttcttttgctgtgcagaaactctttagtttaattagatcccatttgtcaattttggcttttgttgctattgcttttggtgttttagacatgaagtctttgcccatgcctatatcctgaatggtattgcctaggttttcttctagggtttttgtggtgttaggtcttacatttaagtctttaatccatcttgagttaatttttgtatatggtgtaaggaagggatcaataattctcttatcaaaaaaaccttcctctcctagccatgccaaataactgagcrctctgtgagccatccagctgtcagctagccaagtagcattttcacccactaatattagtctttaaaaagcaagaatcaaaagagaagtcaaggaatatcataaaatatctatgatcacaatggcaaacatcaggattttcaccaacatttatcaatgagaacagttctatacattagcattctgttcatctgtgaaaaaaaaactttttgatatctgaaggtcctcagaaccctttgagaattaaagagacttcaactgccagcaaattctacatcgggcatattctttaagacattgctgatctcacaagaggtagtgaaaactctccaaaacaacatcaatgaaacaaaatgaaacaaacataccctcagttccaagctgtgagctgcaggcacacttagcaggtcagggttttccccatgatagatgcccagagaggtacagtggtgagcattgccccaaaggcagatggctgtagcagttttctgagcaataagtgagaaggagctaagtgtagggcttctgaattaagccaggattctcaatagtgtctgaaatagtcataagtcagtaacacccctggctactgaattcctaattcagacyttgtaggagtcccccagtttaaggtcaagaaactagttccaaataatatcagcaagcatgtgagaagctaaccatcttgaatgacattcatcatcaacaagaaaactgatacagactccctgctcttcccctacctggggaaagcagaaattgggattgcctgatacagaatataaaaaagctattatgaattatttaaaggaagagggcataggcttgcaacaataaactattaggaataaccaggatgatttgaaaaccaagtgaaaaaaaggtgaagcttctaaaagttaaaagtataattattgaaataaaaattcagtggaagggttagatagcttactggacacagcagaagaaaaacctgaaactgaaagagatatgcaaagaaattaccagaatgaaagcaacagtgtcttaaagaatatgccctatccaggatctgctggaatttgaaggcttttagttcttgaaggattcataggatctttgaatattaaagaggtatgtcttcttcactgatcaatggaagagtaaagtgcagaactgttctcactaatgaactttagtgagaaatgtttgtttttacttttgccagtgtaattatatattttcatgttattttgcttctgttctgatttttactttggcaatcaatattagtgagtaagtagtgagaagaagatggaaaataaaaaagaggcattcagaaatgtgaaggctagaataagaaagtctagtacttatctaactggagtccagtactgatgaacatgtgaagccgtaatgcataaacaacatatccaagaaggtaaatgaaaagaaattcatgcccaaacacactgcggttaaactgccgaatactaaagacaaatagagagtataaaagcaaccaaagagaaaaggtagatcaccttagaagtaaattgacaagagacttctcaacagcaaaatggaagcagaaggataatggaattcaaagtgttaagagaaaatgactgagtacttggtaatctctcaagaatgagagtgagccaggcgtagtggcacatgtgtgtaatctcaggcctttgggaggccaaggtgggtggatcacttgaggctgggagttcaagaccagcctggccaacttggtgaaaacccatctctaccaaaaatacaacaaaaaaaaagagccaggtatggtggtgcatgcctataatcccagctacccagaaggctgaggcccaagaatcgcttgaacctgagaggtgaaggttgcagtgagccgagatagcaccactgcactccagcctgagcaagagagcgagactctgtctcaaaacaaaaaacaaacaaaacaaaaagagtgaaatgaaatatctattggttgaataaacaaaaatactgaaaaagtacatttcaaggatagtaagccagagaagatatttgaacatctgtaacagacaacagattaatatctagcatattttttaaaaaagtctaaaattcarttttaaggaaaagacagttagaaactgggaagtgaaaagccagggacatacaaatcaagatttaaattcaattttatacatttcagattgtcaaaattaagaagtctgacagcaccaaatgtggaagagactacaattttcataaagcgcttgtggggagtgtacattggtagccactttggaaaacaatttggcattatcttgtaaaattttaatactcacacattgtacaacccagaaatgccacttaaacatatttacaggaatatttagagaaactcttctcataatagcaaaaaattgatatttcaaacgtccatctgcatacaaataggttaataaattatagtatagtcatacaatggaatactatataattatgaaaatgagtaaatcatagtctttcactaacaagaacttaaatgttagaaacctcataccaaattttaatagtgtcccagaaaactacatatagtataataccatttaataaagcctcmaaacaagcaaaattaaatagtatattattttgttttacatagtatgtgataaagctgtattttcttccttttttttttttttttttttttttgagacaatgtctcactctgtcacccagactggagtgcagtggtgcaatcataacttggcttactgcagttagacctcctgggctcatgtgatccttccatctcagccgccagagtagtagctgtgactacaggcgcatgccaccacacctgcctaaattttttgtatttttttatagagacaaggtttcaccttgttgcccaggctagtctcgaactcctggactcaagcgatcaatccgcctcagtctgtcaaagtgttgggattacaggtgtgagccaccacacccagcctatattttcttaaagatcaaggaaatgacaaacccaaaattgagaataatgattactttgtcaaacctatcgcctttgtaacatctcagtcacaattgggaatcacaaactaccagagatggaagtgctttctcattttatagttgaaaaaggtgaggcccagaaaggaagttacgtgacatctgtattaattccacaaattttaatttagcactatcataggcatttggattccatccaggggtataagagactattcctgccgctgaggaacttataattttaattgagcagtgagggaggggcagaaaataaacactaaaacaataataagtaaattctgtggtgtgttagaaagtcataagtgctattggaaaggagaaaaactggagcagagtaaagaagatcaagagttccagaagagaggtggggcagggacaggccacagtattaaataggttggcttagccccattgagaaggtgagatgcaaaacttgaaggcgatgaaggaaataggcaagtgtgtatttagagaaagctttcttcttgaggaaagaaagaagtcaagagtgatttcaaggattttggcttgagaaactggaaggatggcgttgcgtctgctgagatggagaaagccgcaagtgaagtgagtttgtaggggagggtcaggacttcaatttggacaggctggcttagagatggctattaattatttaaatgaagctgtcaagtaatcagaacatactcatccagagttctaaatggacgtttggagaaagtcaaaatgcatgtcaatgaccaaagcaatactaatgcagtgctttttgcaccaaacagggccagatacmtttgaaagaattagcaattaagttttatgaagatgaacacaatagaaatgaataggaatatgatgaacccaaaaaatggagtcagaaaacacgtccagttcgatttttttcagctctttccaaagatgtaaatatagcagaatattcagttggcctcaaattgacatatttgccattttgagatagcagtcgattttgtgaggatttatctgattacttctcatgttattcccatagtctctttctgtctgtaagccacaacaatgatggggcacactttaaacaacataaataagtgaaacaaattctgcaggaaattatgcaacatagagaattccaaaaaaattatccacatgtggatttttattggccctgatcatgttttagaatgaaatgattataactttgccaggctgcttagcacaattacaaaggctggggcatgctgttggaatgatttgcagagagacttaactgattacacggtgttttatttgcattacattaaatccagagcacttcttagagcatgccgaaaaccaaatgtagagccaagatccaatgaaagccgcagctggatgtggtcagtgtctaagagctaaaaaagggacctggagatcctctggttctttattttatagcagagaacatttagttccagagaggttaagtgacttgtctaaagtcaccagtgacagaatcgtgtcaagaacctgccttttctgattcccaggccagtatacctttcgctgtaggttgctgcttccatgtgtcataaagacttaaaatttgmttcttttttatccctttgcagggtttcttccggagaacaatcagattgaagcttatctatgacagatgtgatcttaactgtcggatccacaaaaaaagtagaaataaatgtcagtactgtcggtttcagaaatgccttgcagtggggatgtctcataatggtaagtaaacagtcatcaccwtatactttattattctcattatagctgccagaccagtggacactaaagccattgccaaaaatgtgtacagtttttccaccaaatgccagaatttagaatattgcatggcgataaaacatttctcttttaggtcagtgtttttaaagttttattatagaacctttctctctgtggttgggcatctgccatgaggagaaaagagacttgaaaaatctgggggattatgggaaaaactttagtgttagaacaaatataatgatcatcatgattaatttttatattgcctcatgcattaaaaacagaattaaaatttacttttgtgtatcagtagtgtcrttctgctttaaatgtaagaaaatcctgaagatgtctgggtctgaaactttaaatggcatatgagaatttagattcatttaattttttttttttttttttttttgctgtttattaygcaaagacgagtattsgtttccttcacttcaaggaacgtccatgagttgtggaaagggtaaaacaaattatttttatagttctgcaaaacttcaaagccatagaaacataagagaataaaactttctacttttgaaacctgtgtctaaagtcaagcttatgactttgggtgtcaayttaagggaaatgatgtagaagacctgagaaaagacccatgttttcatgatctgtggaactaactcagtaaggtcctggaagacaaacgtgtttgaaaaaataattcttggtcactatttggttctgattggttgcctggctgacaaaataaattttaggtgtaacttgatagtattatatgtgtctagtattaatcagttattttcaatgcactcaaggaataaaaaatgccaacatgatcaaattaaatttgaagtttcatttcatcagctatcctattttttctttcttttgttttcatctctctcaaaactgatctagtaagaaggcagtcttcatctatatgtactctaaagcatctgagaaaattaaatttttgctctatcatgcagatacttggttttcacagtggaaaccatcaagatatttgagagtcactcattgattaataacctaccctttaaaaatagttcacaaaattctatctgtatgattactaatgggtcagttcctctaaaggcaagaatgtattttgaatagagctatcagcagtactgaacaggatggaaatttggtccaactttcctcaacaattgactacatctgctgtatacaactgtagtcatggattgcaaaataatttgctggttcagttccatcagtttcctttttatttcagacctcataaaacataagggcaagcttccaagtcaagggttgtattttaggtgatgcaatcaagttgcaataaacttatttcatcttcatgaagaaatcattgactttgaggtcattatcactgagacagcctaggaaagcatgccagttccgcttttaacactaatttttgcctattaaaaaattatcacttcacacattcatgtaaaatataattcctgttacttacaggcagtgcatacattgatgtaaaatatatttcctgttgcttacaggcattgcatacgtttacttaaaatcaatctgcaattgcttattgtttataggcaaatattatttaaaccccaacctatgtagtatggatggtataattttctcctcccataaatgtcaaagaaagctatcataaacttgataggtcatattttgacttcatatgacaatttattttatttctagagagggtcaatcttgatagggagtgtttgttcagttctagcaaaagcaagaaaatatatgaattaagtgtcatgacatcagagacttaggcagttcaacacttaaaaaattgcaaacakaactaagaaaacctcagaggtttttatgggagtttgtttgctgcacagaaaataaacatcagactaacaacaaggttttgattagttttgcctgttagctgtatgaagaaaacatttctaaatacaaagttttctaggaagttgagtcactatttaaaatccattgctttgaccaatgtgaagccaacagggttttcattcatatagaatgcctttttatcaaaagaggctctgagtgttataccaaaatcagcacccagctgttttcagtatgcgcaagaaaacatgaacgtcccccaaagcaaatgtactccattccgtgttaaccttatttctgctccctggtctctgattagtctggttgatgaatgtagcttcccctttggccatgcactcacagctttgaaggaggcttctgaaggaactggtagggaaccctaggggctcttgctaatgttgttggatagtcactgaaatcagtgatcaccatgtcctttcactttgaaaattctatgattctgtataatcaaacaacctaactcactggatttttcacttttcaaccagctattccgtgtcttacagtgctctggtcttcacagataggtaggcacctggcatgtcagttgcctgaatttgaaagttttcacctgtatgttttggtacgataaaaataaaaatgtaatttatatatctgaatcaggtctgtatgttatgatcaattgctcagcaatttcgggcagttggtttgatggttatgtagtaatgtagcctgagagcagaaatacagagcctctgggctagagaaagtataaatggcatcctaggctatgtagggttacagctcttcagaaggaactttcattttcattgtgacacatcgtctacatgttgtagaagaacatagtttcagaattcttccagttagaaacatagtttctcaaatattcactttcagcattgggtagaaaaagtacccaggtgatggactgattgatatgcttcagaaatatgttttttcctgcaagtaatgaaaataaacacacgttcttaattattttggtcatttaacaacccatsatttctggaccatgggttaattccaccgattgctcagaagccttcctgagtcatctcaagcacaatcaattcactactgtgtctagacactgcccttagaggaaagctcaaaatgaaaatgaagcagaaatacagacccacttcctaggccactcagcggtgtatgtaacttaccaagtgatcattgcatcaactactctttgttagtgaagctggtgtctgcagaatcttgataaaaagactcatggataatgttgcttctttagtcaaatgggctcttgcatgcatttttatagattttcaaagtagtcatttttgttttaaaatcctgctgccaagtcctttatagtaattgcattttaaaaatatgtcttctttattttttattattatttttttttgagatggagtctcgctctgtcrcccagtctggagttmaatggtacaatcttggctcactgcaacctccgcctcccaggttcaagcaattctcctgccttagcctcctgagtagctgggattacaggtgcccgaaaccatacccagctgatttttgtatttttagtaaagatggggcttcaccatgttggccaagatggtctcgaactcctgacctcaggtgatccacccacctcagcctcccaaagtgctaggattacaggcgtgagctaccacactggccttgtcctctttatttttaataaaattatttagtcattaagaattttggcttgtgggccrggcatggtggctcatgcctataatcccagcactttgggaggccraggtcagaggaccacttgagctgaggagttcgagaccagcctgggaaacatgacaagactccatatctactaaaactacaaaaaattagtcgggcgtgatggcttgtgcctgtrgtttcagctactcgggagtctggagtgggaagatcgctttagcccagggggtggaagttgcagtgagccatgattgcaccactgcactccagtctgggtaacagagcaagacccagtctcaaaaaaaaaaaaaaaaaaagaattgtgactagtgaataattcatattcagagctctttttaatgtatgaactaaataataaaatagtaagtttaggctaagtgccctttttatttttaaaattttctgtatttattattactatttttagagatggagtctccctgtgttgcttaggctgggctcacctcakcatctggagttgctgaaactataggcatgtgccactgcacctgacctatttaagaaaataatctagagaagaattgacatgttatttatgaatcattcagttaggttttctctataacattgagatttggttaaaaatatgtttttcataaatttaaaaactattgaaatcttagctttgctgactaggatgtcttattatataaatgagagagagtttgtaattttttaaaaaaaactgacaactttcaaaatagtttctcagtggcttcataaaaatccagaaaaaaagatttcacaaatttttgtgacactcaacatttttaaggtagttctctcagtgccttgcaaacagcagctctagtgtatattgagaaaaggaaaaattctgaatggcaaatactagatttcaactttaacctattcctttttattattattattattattattattattattattattattattattgagacaaagtctcgctctgttgcccaggctggagtgcagtggcgcgatctaggctcactgcaagctccacctcccggattcacaccattctcctgcctcaccctcctgagtagctgggactacaggcgcctgccaccatgcccggctaattttttgtatttttagtagagacggggtttcaccgtgttagccaggatggtcgcgatctcctgacctcatgatctgcccacctcagcctctcaaagtgctgggattacaggcgtgagccaccgcgtctggctaacctattccttttttttctttagtcttcttggttgtgtaaagaaaaattacccaaatcttaactttcagaaaaggtaacaaactcctaatgcatgtggcagtacatgtttgctccagctgccctgtccctctaccctgcgtggactccagaaccgcccatgttggagcccacctcctytccccacccctgcccactttccactcacacctcaggcaaaccctgcattttgctgttcctggaaaatggcttatgcttggatacctctgggcctctgttgatgcgtctgtctgttccttgtggaaattcttcctgacattcaaggctgcattcaaatgccttccttcccatgagacttttctgattccctgctcttccttttctatgtgtttcataccttcctgtgatatcacattctgccttaaaaagcaagagagtgatcagatacatattaccaaaaaaaaaaaaataccgatagcagtaaaaatgatagagaaaagactggaattgggaaatccatctgaagaccaatgcaatattaggaaataagacattgagaagggtgagaagaaaggaaattgagagaaatatcagagcagtgaccaatgaataaaagcgcctgaagggagagaagttgtcaaagattatttaggatatctaatttgggtgatagaatgaattaaccaagagaggaacacaggaataagagccagtttggaggagaaaattttaaattcagttttatattgtgttagagatgcctatagagtatccagcaactacgtatagaggaatataggaggatgtgaaaaataaggctccaaatttcagtgaagagagagcaggaatcatcagcacccattgtaggttagagaggtcacactagggaccacagaatacaagctaagggagaggcaccatcagagagatctggagagcagctggcagaatgttagaggacccagaacagcaggaaccaggacaagaaattttggaartaagagggcggagatggtcaccagaattaaaggctgggagaatactgaagagctcaagtctattgagaacttagaagaggccattagttctggccgagagaaaagcattcaggatttttacaaagttttggtaaatcccagtgagcgcaaagctagactgcagtagatcgagaagtgaatagaaagtgacaaacacagacggagtgaaaacaactctttcagtaagttcagtggtggaggaaagatagcttaaagaggaggtaatagtagagtcagaaccttcaacctgggcagaaaggccagagccagtacagagaggcacactagagaaagactcatctgtgtaatatacccagtctcccctaccagacatgtcctttccatcctttcccccagccccatctgtgcagcacagtgttgcatcaacgaagtgttcagtgaatgaattaaaggttgtcaggaagacttcagggaatcagagattgagttagaaggtgagctggtggtgttttgctcatcttcatttttgaaagaaacctaagaaaatgtttaaatgtcctctacaaatagtgtgaaaaatggtacctctgcataaaaataatttaatattagtgctaaagttgctccttgttttcctttagaggaactacaaaaggatagttattagattgccaaatcctgcagaacctccagcaggcacaagttggtttttctccctcaagaaagagaagtgagccaagcgtggtggtgcatgcctgtggtcccagctactcaggaggctgaggtaggagcttcccttgaacccaggtgttcaaggctgcagtgagccaagatcacactactgtgctccagcccaggcaagagaatgagaccctgtctctttaaaaaaaaaagaaagaaagaaagaaaagaaagagaaaggatggaagggaggaaggaaggaaggaagggagggagggagggaaaaaggaaaaaggaagggaggaaaagaaggaaggaaagaaagagaggtgagccaggtgtagtggctcatacctgcaattccagcactttgggagactgaggcaggaggatcacttgggccaggagttttggcgagatcccatgtctaccaaaaaaaaaaaaaaaaaaaaaattagctgggcatggtcatgtgtgcctgtgggcccagccacttgggaggctgaggcagaatgattgcttgagcccagaaggttgcagtgagctacgatcatgccactacactcccacctgcgtgatcgagaaagaccctgtctctaaaaaaaaaaaaaaaattttaaaragagatgggaaaacaacttattggcaatagcacatgttcttgtttgtatgcaacaaacatataaaaagtagaaaaattgaccataagacatagccttactatttttcaaaagcctgataatgattgcaaattcatcccttagatgtggaaagacaaaaataagacttgtcttatttcattctgttattttctattgatttattattttgaaaacctgctttaattaaccttagtaattaagtagcatttgtctttaatgcttctacaattaggtagatgttttaaaaacatgccgattaattgtttcttagcgttatacccagatccaaaaagcaggacatctaactattccatgtgcttggtgtttgtgtgttcagcaatatcagtactaaatacacaatacaaatctataacatgctagtagtagctacattcagctcaatagaagtgtgttgtataaaggaatgccaatatgctttcccagaagttaatgagtctctatcaaacccagtcttcctgaagggagcctaccagctctgatatggataattttttttaccaagataccagatttctctgtaggtgatgaattattccaaataggaaactgcgtgccagtgttctggaagttgctctgtgtgacaggtgccagatctgtagaacagacagaatgtaattttttttgagcctcaaaaactagacaaatactgcttttaaaaagagagcagagcattttcttgagtactatgtagacatttgtagaactttagagctaaatttagagctagaggaaggaaactttagaatcttcttttctaagttcctcattcagtaaataaatcagttgaagaccagagaagttcagtaattttcttaaagccacatagctagtttgtcactgagctgaaactagaaattaagcttcctgactgcattcagtgcagtattcattcccttgctttccagagaggccaaaagttcttgctcagtgactcacagtaagacatgaagcattttccttttaagattaatcagcagtggtagaagatttggaaaaatacacttgtatatgagtacactcagcctttatagttctgacccccaatgcagaatgttcatcttctatttctaaggtctgacttcagtctttcaggaaacacctcccaacctccttcgctttcctcctcttggttgtcagattctccacatgaagggtagaacctraggctcaagaattacttaactaaaaaacaccatctcacaaacaatttaaagatggaaagatagaaatagagataggcagacagatggacacatagattaggktttcagattctgttctttctctgtgggagaggtcagcgtgccatgactaccagcctggtctagaacccacagcagccatagttaccaagaccacagcaataaaagctgtgtttgttaagcattgccatgcacctagcactgtgttaaacacttcctgtgcctcctctcatcacctcacgtgaggtagataggtacaattatgtgggactcaaaagcaacgaaataataaaactggcttttttcccccttaaaaaaggtatgcgtgcctcagctgaaagacagaaaaaaaaaaaaaagtaggcaaataaaaatccttgttttctgtacaatttcagatttgtgtatgttttatgggaatttagtctcaccaaatgggatcgatttttcattccttttatgaacttctggtgtataaaaatgttaaaatcacctatataattggttgcactggtagttaaatggaacctaatttgtagcatgggcatttaacaatacagataatttattcattagagttagcctttggggggaacttcaacttacaaaaatacgttttagtgagattatagcagagggatctcactttaatatatcctaattctaaaatggtttttcggggtattttttggttatatttgttaggtgatagaaaagcaagactagtaaatgtagtaagtggctatctttggctgtttgtccatttaaattaacttttttgattacccattaggaaaaaattgcttttctaggtgtgtaaagttttgcatatgattatagcctcttacctgtaaaaactgaatcagagcttagaaccatgcctggykcacaatagtcattcaacaattattccttgaataaagagacagtattgtgtggtctgtgaaataacaaaagttcaggagcaacagacacttggtgattctagtcacctctattttgttataggataactggttttctctgagttttacaccagaatgccttcttcttttaatacgccttcttacttrgtgcttttctcatgatcattttcccaaacttcctaatggacatagtgtctcattttctgtctgtttttaaacctgatactttggagtttaatccatcaaacatttattgttaacctactatgtgtattttgttacacctaggaacaaagatgagaaaacatgttactcatataatttatattcgagtagaataactgatataaaccaacatcatagtatagtaacagtttaatacatgagctaatgtatgcatacaacaggagcccagcatttaggaagctttttataaactgtcccaaaccccaggttttttatatactcctaattgagtggatggatggcccatcaaaatgtcccgtggaagacatataatgtcagaagttaccgagtgactctgataggctctgcctcccctaccctccgcactcctcaattaggaactactggtgaacaagaaatgaatgtagtacagccatccctccttattccctgggattggctccaggacccactcagataccaaaattcctaaatgtgcaagtctctgatataaaatggcatagtatttgcatgtaacctacacataccctcctgtatactttagatcatctctagatgrcttataatatctaatacagtataaatactgtataaatagttcctatggccaggtgtcatggctcatgcctgtaatcccatctctttgggaggtggaggcaggaggatcccttgagcccaggagttcgagaccagcctgggcaacatggtgaaaccctgtctctacaaaaaaattaaaaattagccaggcgtggtggcacacacctgtagtcctagctactcaggaggctgaggtgggagaatcgattgagtctaggaggtcgaggctgcagtgagccatgattgtgccactgcactccagcctgggtgacagaacgagaccctgtctcaaaaaaaaaaaaaaaagttgttatactgtatttttttatttgtcttattttttatcattgttttatttatttattttagagacagagtcttgctgtcacccaggctaaagtgtagtggctctatcacgactcactgcagcctcaaactcctgggctcaagggatccttccacctcagcctcctgagtagctgggattagaggcgcacaccaccacgcccagctatttatttttatttttatttttgtacagacagggtctctctatgttgcccaggctgctctcaaattcctggcctcaggcaatcctttcactttggcctcccaaagttctgggattacaggtgtgagctaccacacccagcccatattattttttattggttcttttttccaaatattttcaatccacagttggttgaatctgcagatgtggaacctgcgggtatggagggccaactgcataaggaattctatctgagcaaagtggtcaggaggtcacagaggattttgaaggaatatgctatctggggttttctttccattgtatttcaaaatacagtagacaaggacttaatatgtgccagaaattgtactaagtgctgaggatmcaataatgaacaagattcctgcctttgtggagattatatggcaagggaggaaagaaaacattatagattaattcctgtgatcagtgctgtgagataaggtcatatcctgagggacccagacaagcctagcaccaggggctggggtcaccagtagataaaaatatgaacaaccataccccagccccatggaacaacacagaaagaaaatggggaagagtgagtagggaacaggatttttgaccaaaacctcctagtttaaaggtttctatatgaagaggccatgtaccaaggatatattcactaaaagtatctaaatataggctaattcaatttaaaggaatcccaactgagaggtaagattttcttcccctctaacacccaagtctggtctctaaggaggcccctacmaaacaatagttgtattagtcagygataaaatttatttasggtcaatggaaatgaatttatgaatttgagactcaagggtacatgtcagtttcttcttgggaaaatccaaggtaatattcacagagtactcagatgggaaagttgtcgtgtgctgtcatgtctcatggtagaaatgctacccttagcataataacatrtaaaataactatctctggctgggcacagtggctcatgcctgtaaccccaacactttgggaggctgaggtgggtgaatcacttgaggtcaggagtttgagacccacctggacaacgtggtaaaaccctgtctctactaaaaatacaaaactgagccaggcatggtggcccaccccttgtaatcccagctactcagaggctgaggcaggagaatcgcttgaacccaggaggtggaggttgcagtgagctgggattgtgccactgcactccagcctgggcgacagagcaagactccatctcaaaatataaaataaaataaaataaaaatctctttgttctgggattcagcagagacagagtcttgctagagacataaacaaatatgacagtctctgcgctcgaggagcatatagtctagtgaagccgatcaccataaaaacgcatggctgtgataccacatcgtgagtgtaagaacagagctatgtatgcrtggggaacagtggacatgatggccaggtacccttattatgggaaacatagaacccaaagtgtgttcccaaaggaacatgattcaaaataatattttgctgaacatattggtaagaaggaaagaaaacatatctgagttgaaaagttacagtttattttttccccaaactagtccccactaacccctcttacattttccttgttgcttttctttctttcattatcttctttgacacttcctcaccctacaggcagccagtttgtctttctgacaaacatcattaagtggtaactctggagagtcgggagataactatggcttctctccgctacatgtaaaagtgctctctggactagtaaaatgtgataaagcaccatccatatttctttttaacagagacaaacaaatcttataaactccctgagaacaaagcctatgtctgtacaactttgaattctgcacagtttcgtattttaattcgtgaaacgtgttgatccttctagtgcctgaccttaggtcaagtgctggggatacaaagaaggtgacctttgaattgggtcttgagggatgagtaggagttggttctcaattatttcacgtttaagtcgacatacttccctccctttgctaaactcgaattctttcactttctcagcaggaktatgcattaacttttaaaaatgaaagttaacggtttaatttttactgatggtctgtgctacttttgtgaaataaaaacatgagcaaagtggtagacagaaaccaggactcaagagcagtggaggaggagggcttctactgtgtgggaacgagggctgggagagcacagtgtgtgttcagagcagtagtaatccaatgattcatcctgtcattcctcttcctctatagccatcaggtttgggcggatgccacaggccgagaaggagaagctgttggcggagatctccagtgatatcgaccagctgaatccagagtccgctgacctccgggccctggcaaaacatttgtatgactcatacataaagtccttcccgctgaccaaagcaaaggcgagggcgatcttgacaggaaagacaacagacaaatcagttagttctcttctgctgtcttcattgggggaggcgggaagttgttttgggtttttgtttctttgagtaaatggtttactgcgctacaaatgcacacacagaatattgttcaactgttggctgttaacatattgcaggctgagtctgaaacgcaggaagtgttttcagatagcacaagtcaacattattttgaaaagggagaaaagtccataaagtttttgagaatagtgtaasaatgtattggtcatcctaactttaatgaatgaacttaagccccctgagcctatcaccctcttttaggatccatctcctttytcggcatcaaaataactggccacagcaatattcattcaagcagccttgctttccyctgggaagaacccgacctaggtttagaaaaggtattgaatcccactatttcacctttcaggagaactaccagagttacctctttttttttttttttttttttttttgagatgtcgtctcactttgtcgcccaggctggagtgcagtggcacaatctcggctcaccgcaacctccgcctcccaggttaaagcgattatcatgcctcagcatcccgagtagctgggattacaggtgtgcacgaccatgcctggctaatctttgtatttttagtagagacggggtttcaccttgttgatcaggctggtctagagttacctcttaagaagttcaacatgaggcataaaaatagattctagatattatgttacctttctttccttgtagcattcttgattattccggggcaactagaagctctatccttttattacatatgtgaattttatcttctgcaaggctctgagctgcctggactacttcagtggactctccaacatctgttcactcattgagcagcactgtttagaaaacccagaatgggttgtaattgttactgagttaggttttccaagcagcagagctcttctctgactggaaactgagaaaacaacatggaattatagaataaaattgtacctgaattctagtcccaattctgccatcagcttggatgacctggatcatgtctctgtacctcagtttgttgttgttgttgttgttgttgttttgagacagagtcttgctctgttgccaggctggaatgcagtggcgtgatctcggctcactgcaacctccacctccctggttcaagcaattctcctgcgtcagcctcccgagtagctgggattgcaggcgcatgccaccatgcccagctaatttttttgtatttttagtagagatgggttttcaccatgttggccaggatggtcttgatctcctgacctcgtgatctgcccgcctctgcctcccaaagtgctgggattacaggcrtgagccaccgcgcccggctttgtagctcagtttttaatgacagggtttggcttygattctgatgtctgcacarcgctcccagggctgtaagaactgcagaacacactgagaagacaccgtcccagccatggaaagcccttctatgcagtcatttattttcacatgaacacctcccagagagctatgcaatgacttgatagatatgtgtaacttttcccctattcagatatattgttaggaaaatctcattaacctttcatgtattttgatgactatctcaagatggtagttcttctgtttagctaaactagtaagagtagaatcagttaatagaaaaaggaaacttatggcataaagccatatggtaataaggacaatgagttttctgatttgaaaataggtctttgatacctcaacaataatatacctggattcaattctttacagtataaaaaaaaccttgcacatttgttaggttcgagccacatgcacctgactactgctattattatcctctttattttagagatgaggaaaataaagtccagagaggttaaacattttgccctaagaccccacagcaagtgkgtagaagacctgggactataatgcaggttttctggcctctagttcagagcattcgtagcatgctagcccctcagtagcatagtactttaggaagctagtctttcccacttgctggtagtaagmcagggagacataatacactaagaaagcttcgstctgagaaaactttccatgattgttttttctcaatttttagaacagtaggaattcttcacctcatctgctatcccaacatattcacaattggaaaatttttgtgctgttmtgttcttttcaaattacaaaagtccttgactaggactgctggcttttacatgcacaggactgcacaacactggtgtttataaagctcattcgttcaatgataaaattggccatagcaaatcaaaaataaatgaagacctctgcgtagctgattggactacagaaaataarccattcatatccaggaagaaaaaattaaaaggattgctgaaaaggaaagagccctaaagcaaactatctacagttttggttagttttcttttcttttcttttctttttttttttttttttttgaggtggrgtcttgctttgttgcccaggtgggagtgtcttcttatattggtcaggctggccttgaactcggggctcaagcmgtcctcccacctcagcctcccaaagagctggtattacaggtgtgagccaccagccatggttagttttcatcaactgctttctcaccttcttttcatcctctaattcatacctgcaatccttattagaaatcctgtcaacttaatagtaccagaaagtcaggcaaaagactgataaaaaaaaagcctcrgtggtcaagaacttaaaattacactactggtgtgcaacgtgctcttatctgtgttactggaggacaccctcaagatacctcactccagttgactccttggctctaaatctttgagttaaaaaataaggaggttctttatggaataaacaggtattaagctatttaaaggagagggctgcgaaatgcttgattatgggcttttcaagttcagaggccaagcgtttgtcattttcttccagtaactaggactgtgtcttgcccctaatagttactcagactatatttgcttaattgaattaaacacagttgcctatgccctttgaaattctggactttcaacagagggcctctagcccaatatttgcttaccaaactggacatcattgatgatctggattcaggcagggtctggaaaaagagagactgggccaaattaaaataatccattcactgatgacacaaaactaaactacaattgtttggcaccctctcttctccttatcttgcaaaatcaaattaagcactagtggaaagaaacagttcagagaggaatatgggaaagrraaaaaaaaaaccaaaatgtgatttccaacgagactagagatttgttctttatctacatggtcatgttactcatttgatagcatctatctcaggggtattatgttatctcttggccaggactcatgaaagttaagatttgcattgataggaaaagttttgcagaaatatggactcttgagagggtgggaggtatataaaagtggctatggctgtgcagcagagcaatttgcatttcttatacaccctgcttgagactgatgtcattagtgttggttaggccaaggctgggggaggctactcagaatagtgggtgaccaattacccagaacctttggaaaaggaaatgacttgattgaagaggccattctttaaatgtatcttactgctcaatttcaccattgcctattgtagaatgcgcsctgcccgctcagcatttgcctctaggcagaccaggactccttcccctccccaactaatcttccttctcctgtatcttattccctagggccacttgcacctttcaaaatggataaattaaattcccctgctccccttctaccaactytaacatcatatccttggtgtatgatgccctacttttcattgttttgcctaaataagagtatgcttgggaattttaggcttagggctgggaaaagatgggatatggaatcgtcagctatagattgccggacaagaaattttaggagcagtagacctttcaaccgccctcaataggatggaactgactgtccccacaacctatttccctttcagtggcttgctccagccaaggccccttatttaagagatctttgtgcgctctgaaaaccatgcatatgccagaactaggtgctctgtttcatgaaggcagtttgataactgaatggactttggaagtgcccagtgtttgactattaccctggtgcgatgatcacactgggcgtatcattgtcacatgatcccatgtttgttgatgaaaataaacagtggttttcaaaaaccattttcagtgccatggtttgtcataaaacaataaatagaaaagcgcttgatgtacctgccaacttttcacccctatctaagagatggcgaagctccggctgcactctgtctgcaaataaggaataaaactttttatttgtgctatattggactttgggttccaaagcatcacattgtttatggtaggtacatgtggagtcactgtatttataattataagagcaaactggtgccattggaaaaaatggtctttctaaatagtgtgtgaaatatgaaactagtgaagaataaaatcaatatggaaatgtaaacttctatgaaaacatttccttacccatttaagtttgtgcattctgaaatttacaatggccatcaaacccagtgactcaaagctattggaaagatatctgtccttttaaatcctacacttacagctaaacaacgtatgggttcttttccctttatctctggaaaagcccgactgagctggaatttgctccccaaaggaaagacatcaggcagaatcctcagagaaaggggcttagggaccccagtagaaataaaatcaggatagtagtgccaattcatttctggggctgctggagaagttaggcttctgggatcattcatccatgtatcaatattaataaaataaattcttctattgccaggactgtcaggaatagctaaagatgtaaaagatctaaaccagtgtgttctttcagagaataagttaaaaataatattttatagagttaaaaagaaaagcacttggattttttttttccaatggctggactcagttggccaatacccttgtttgcctgctgagtaactctttggctggcaattgatttttttaagagctgtggttatgtgctagttcattagcatgtgaataattcttcatattaagttttcatttgtttgtcgtaaatctctaaaccctgcaggaaagcagaatatctttgacagctttcaaacttcacttctatcacacacagcactccaccagcacctctaggaaacagtggttcaaaaggccctgccccaagaccccagcatgttaagagcgttagtttaaaatctccagttcatcctagaacaatcattttaaaaggaaaaaaagaagtggggaagtcctatagaaagcaatggaaagggaaaagttctcaacccagaatcggggcttaggttctagttcctggtttgctataaatggcactttgactttggaatgtctctggcttccgtttatccattagtcagagaatgatgggacagattacttctgaagaccccttatgtcctataaatctcatagttctcaacaagagggaaacgggaacaacaggggcagaaaccaacgagabgctgaggaaaccaaaccaatgagttttggattgtagctaaccgaggagaaccaggtgtgtcaaaggtgatgaaagtcagatgtgtaaaaagcaagaaggaaacaaaatgaagaacatgagccctaagaattcagtgtctttccctggtaaaactaagaacatcaggaaagccacactcgatgaggcacacatttttccaagccagttttcactctgacagggttacctcaagtgattgtttgagagagggtagaggggttgactacactcattcaatctgccaaattagaaaagtcacccagaataccctgtgctttttgagtgattttcatgtttatctcccgtagcttgctattttgttattcaaaaggagtgtaaacttagggcattcatgtataatacctttcataactcatgttaaaatgctgatgttattggatttctcaggaacactactgttctatttctccattcaaaaaggtaaaaaaaaaattaattactctattttcatcattaatcccatttcccccattgtctttgtattctacataggaagcatgccatagatctataattgaatttactcatctatataaaacagtacttttaatcccatcctgaaaatcaaaatatatttttgaaaatcaaaatatgtcaaaattgaaaatcaaaatgtcaaaatattgaaaattgaaatatatcaaaattaattatatttgatgtatccctcaaaaaattgatttctccttacagaaatcattttgctttcctggaaaaacactgggttcaagtgcagctttcttcattccgttctggtctgtccagtatatgaaaagcacaagcacacaatgaccagtgacagattcaccatgaagctaatgaagcttcatggggcccttcccttgtgcagaagtccttccagtgcttggggaagggccgaagcaattttattctcataatttgtaatattttccttagagagactccactactgtgtatattttatgccccacaaaacctgaattcaccccatcatgtcccatttgtaattaagctttctttcctgttaaggagggacgcttacccagccctttgatgtacggtctgaagataaatacactgttagcccccaactagaagtgtaaaatcattaagacaaaatttgagaatgatacggctcctataatggcaatctttggatgatactgkccaagctgatggaaagtgtaaggactccactttgctttgtaaaaaatacaaaaaaacagccatggaagtgcagtacattttgtatggaacattgtaccacattgtaccaaatgtcatgttaaattaatgattcaagataaaatgcagaccaaatttgaccagggttttaagaggttctctctccataaagcaggctggccacgatcttctcactaggtttgagggtaaggaggtcccctgtgaaatatgaaagtgaactctctgctatctaagaattggtgaattggttgcaaagaaaggcagaccaggcccacccagggatcactcttgcagtttgacagatctacctggaggctgaaagaatctatgcagccttcggaaatgcagtgaaaacagtataatcagatatgactagggaaaaaataaaacaactggtgttcatttgcatgtcaacacccagaattctctgctagttcacctcttcttcagaatgyagaaaggattgaaaaagctggaatggggccgggcrtggtggctcatgcctgtaatcccatcactttgtgaggcagaggtgggtggatcacctgaggccaggagttcaagaccagcctggccaacatggtgaaaccccgtctatactaaaaaataaaaaaatttaaaaaaaattgccgggcrtggtggtgggtgcctgtaatcccagctactctggaggctgaggagaatcacttgaacccaggaggtggaggttgcagtgagcctagattgcgccattgcactccagcctgggcaacaggagcaaaactccatctcaaaaaaaaaaaaaaaaaaaaatgaaatggtttggcatgatggtggggtgctgattcctctctctgtccttgagtatttactgccaggaaatcctgaccaacatcaattgccaaggggttaaagtcacattgttgttaaattgggagagaaaattagcaggattttgtgccctatgttcaactattacagagtttcaaaaacaggaacctggagctttatatgaggggacaggggaagtaaaggggaagagtgacaagggtgatttatcagggcatagttccagataaatcacttacatggaggtgaaagaatttcatgcatatgttctgtgccaagaagccaaatggttgagcagaagctctgaaagttgaagtgggcagttctgggtacagtctttccacatgtgaaaaggtgatgattttatattcatgttatttgtactcctgcatgtgcagttggtcttttcaggtgtccagatcatcattttctcatgacatgaaagaaagccaataaaggctagttgtggtggctcacacctgtaatcctagcacgcacttagggaggccaaagcaggacgatcacttgagcccaggagttcaagaccagcccaggcaacatacatagcaagacctcatctcaaaaaatgaaataatttttttttagaaaaagaaagtaaatatttcattaatataaattataatacactgtaaaatgcctggaggacaagaaacacgttttctctaggttctgtgaaagcatcattatccattcacatttttctcataattagaacctgacgttctggaaaaatacagtaaattttcatcgatgttacttgctctgccccccttgtattcctcccattaataatattaatcctgaaaagaaaaaaagaaaaaggaaagaaaccacccaagcaaaatgtttaagaaatacggtaaggacagtttggtcccaatttccttaaaaattagagccaccaagtaaacctgtttgggggtcctcacatctgtcctcttttggagtttgctaagtagtacagttgaagtgaattttttggtaacaaaagtaaaaacttccagaataactccagtaaagggtgttgatgtgacgtacaagtttggaaatatatttaatatctgagactcctcaatgttggtgttatttcctccagtttagaacaaacttaatcttttgatgaaaatcatagagttccatagatatgaatagaatctccaaccagtgcatcttgaagccggctgccacggccactcatgcaccttctctcctttcaggagagaattgtcagcatctctgctcaaaacaatctttacttttagtccatcagagacttcatgtttgtcgtgcatgcacactcacacctctccacacatatgcccactccccacacacatcctgcttctgagaaatgcaactagaatttcctccggagaagagatggaaacccctgattgagaaatttaaggcctaggaaaggtaaatgacttttcttaagtcwcatggctcaccacagaaccaaagctggaacacacataccctcagctcttcttccagtgctttcaggtatacaagtatttgaacaggattcaaggtttaactccttatgtgtcattcagtgtatccagtgtaagtaaaatgttaccccttagtcagaacagccttgagaatttctcaatgactacaaaccttgcttagttctatacaagggaagtaaaagagagagaatgtcatgaccaaatgacttaacttttgaaggcagcctattgcaaacttgaataattggggcatgtattttattgattgtttgacctataaggacagatattttaaaatataaattcaaaattgcttttttgcagcattcacctgtaggccttctatatctgctctttgtgaaatagatggcttccagagcattaaaaaaagaaatagacattttcttggttcaagagctgtaatctgctttccgagtgatttttcatagttaagcatattttatgtgcacatagtttcatttgagatctgagaggatttcatctaaaacggaaaagttattacctgtgaaggagaacaaaggaaaaggaaaaagaaattttaagaaaaaaawatttttttaaacctgtagttactttatgttcaagtgggtattttcaacgctgagttgctgaaatggttttttattgaaagaaggttaaaagtgtatttcattgaaagccaagataaacagtagattttgtatcattttaaaaatcaacaatcggccgggtgtggtggctcatgcctgtaatcccagccctttgggaggccaaggcaggcagatcacttgaggccaggagttcaagmccagcctggccaacatggtgaaaccccatctctactaaaaatacaaaaatcagctgggtgtggcagtgcatgccagtaatcccagctacccaggaggctgaggcacaagaattgcttgaacctgggaggtggaggttgcagtgagccctgattgtgccactgtaattcagtctgggcgcagagtgagactctgtctcaaaaacaaacaaacaaataatataaaaatcaacaatgaagactccccaaacaaaagaaatcaggattcttagccagtcataggtaaagtgttacagtgtaaattgaagggaaagaagaccaaaattggtgaaatatgtttggtcccagaagataattaagatgaataaaagaacttgagagtattttctcattattaagcatcttcagctttaaagattttagttagcaaagcaagtttacataaacagttttctgaacctgggatggcattcactgtgagttagaaatctccaagtcatccacgttttccctgttttatttgcagccattcgttatctatgacatgaattccttaatgatgggagaagataaaatcaagttcaaacacatcacccccctgcaggagcagagcaaagaggtggccatccgcatctttcagggctgccagtttcgctccrtggaggctgtgcaggagatcacagagtatgccaaaagcattcctggttttgtaaatcttgacttgaacgaccaagtaactctcctcaaatatggagtccacgagatcatttacacaatgctggcctccttgatgaataaagatggggttctcatatccgagggccaaggcttcatgacaagggagtttctaaagagcctgcgaaagcctttwggtgactttatggagcccaagtttgagtttgctgtgaagttcaatgcactggaattagatgacagcgacttggcaatatttattgctgtcattattctcagtggaggtaagatttgtcttttgatcttctatgaaagagggtgggatgatggtggggtggccaaaagaattttggatttccttagtgttagtctgcattgtcactttaagtgccagtggcatgatgccatgaatcatcactacacgtgcaaaacactgtaccaagaaagagtgtcataggtttgcggtgtgaaggttataagtaacccaggatcttctctttcatccctcaacaatatattttttccagtcaaatgccctcttctcctttttctttttcttttcttttctttgtctctttcttttccttccagaaaggaagattagaggccagtctaatctttggttcctgtaagtaatggcatgtataactttgcttaagacaatgctcacttgatgtagagaagggaccactaagtatttctggtcaaatcatgctcctgccccaccatcagtaagatactactttgaattgcttttgtgatatcaggaattaaggaatacctactgacctccacccactctcttgtgtggattcctctgatggcttcccttaaagtacctttgtgaggtagttggttgtgattaagaatgcaatgtgaaccgaacacacaacatagaaataaatttagttatttagcaatttgttgtatttttggccctgcaagtagtacatgatctgactaaccaattccaaaagccagattttyttytgagtgtgacttttttcttttttttttcttttttttttttcctttttttttttttttttttttttgtgagacagggcctcactctgtcacccagactgaagtgcagttgcacagtcatagctcactgcagcttctaactgcagttagtaagctatgatcatgctacttcataaaagtaatacgtggccattttacagttgggctcaagtgattctcccacctcagcctcccaagtagacaggacaacagctgcacaccaacatgccctgctaattttaaaaatttttttgtagagatgaggtctcattatgttgcccaggctgatctcagattcctgacctcaagcaatcttctcaccttggtctcccaaagcgctgggattataggcataagccaccacgcacaatctaaacattactttcattagcctctcatgagtagaagaaagttttactttcatctctctgtataaaaattgtttttaagtggcaagttttcctattgaagtggactttaggtgagctttttgtatgtactctacagtgtatcctctgtgaaaaacccgtcgggggatagtggtaaactgtatataactgcacaatgtattataaagagcacgatccctttgtcatcttttgttgtccagttgaaaggagaatgtttctgaaatcaggtgcatagtgcagtagtcataagaatagcaaacatttatttaatacttgctgtgtgccaggcagtgttctaagcacttcatgcatatttattcaatcctcacaacaattcagggaagtaaggaccattttacaaatgaggaaaccaaagcactgagaggttttctcatttgcgcaaggttacgtggctagcaaaagatggagacaggattgtgagccaggcatgctggctcagactctacactctctaccatcacatcatgcggaataccggcctttaaatgcctagggtgcaaatagatcacagtatggcatagtttacctttggagctgtgaagtccagggtcaagtcgtgattcactttaaaataactacttgatattgtgggtttttgttgttgttgttgtttgttttttgtttttttgtttttgaggcgaagtctcactcttgttgcccaggctggagtgcaatggcacaatctcggctcactgcaatctccacctcccgggttcaagggattctcctgtctcagcctcccgagtagctgggattacaggcacatgccaccacactcggctaatttttgtatttttagtagagacggggtttcatcatattggtcaggctggtctcgaactcctgacctcaggtgatccgcctgcctcggcctcccaaagtgctgggattataagcatgagccaccatgcccggccgacgttatgtttaatagaacaaaaatatactacctggcatggtttaatatcttgaccaaatttacttcctaaattaatccctggctgtctggtatctttgattaattcagcaaaaaaggatgagattccagtatataagaggtttgccagaagaaaaatattaaattttgaaaaaccagattagaaaaacagttgatattatttatctagtattttattttacttcattttattttattttattttttgagatggagtctcgttctgtcttgcagtggtgcgatctcggctcactacaaccgggttttccgcctcccgggttcaagtgactctcctgcctcagcctccctagtagctgggattacaggaatgtaccactacacccagctaatttttgcatttttactagagacagggtttcacaatgttggccagtctggtctcaaactcctgacctcatgatccacctgcctcagcctcacaaagtgctgggattacaggcatgagccactgcacccagactatttatctactattttaaggcacattttatttttaataaaatttgaaaatatattaatatttaatttatttcaaatatttttcctaagcatactatatatcycatgtctattcttttcacttagtcaatttcccatgtcattacatactctttgttaatagtttttgttaactttttaaataaaagtattacatggtcattttataattgagagtacagaaaggtataagtgaaaagtaaagggctttgccctcaggataaaatagaattaacaaagtcctatttttcctatcaagaagtttacatgcacactcatgtagatagatacatacatacacatatgtgtacrttcatagcagtttgtattcctacccacatatacgaagggaagcatttgaaatgagccattcaaaggtacttagtttctactaggcaaggtctagacaagaaacagtcatgagaattctgggctttatgaagtgagatctgaatctcaggcatctatcgaggatgagatccacctccccgattgtgcttccttagagtaagacaaaatttctcaattagtttttcctcctattccagattttccattcagctaagcaggaggctttcatccactaaacaaatttctgatcctacccagtcttaacaagagtgattgtkttctcctctgcaatttattcgaaagtctatcagttactttggtggtttcagaaagaagtgcttttgttggggatccagttggcctcattctragctggctgtggattcacagaagaacttcacttcagcaaaggctcttagggccccagactaaaagaaagatgagcaagatgtgcgtcatctaagagtgggcgggggtaaggaattggggattaatgggggtgtccctagaggacccaaagaggagatttttagatgaaagtaactgatttgacccaactcagtatttgctggggaaactggagttgctacctaagattgctgccattgaacttcagccttaaaaactgctgataccatttgattggtacttagatttgcctgggcttagcgtctctgctgttcactcagctctcaaaccaagctgctgagaaagatgacctagttcttctcgagtctttctcctctctctctttctcccctgagcttgggggcaagaattagactaaatgaaaggaacagcaacctattctagaaccaaagttcaggacttggtacctttttaagggcatttcatgttcattctctcattccatcctgacagcgctcctgggcttttaattctcatttcacagaaagaaaagtgagggtcgtaaacttaagtgatttgtctgagatctgacaaactagtgccaccgtggaactaacactgaaacctgggtgtcctaactgtcccctctggccctggccagtggactgtggtcagcacactcactcttgtgttggtggctgcaacctgttctctattcactatatccctaaggtaggcccatacctagaagccaggaacagcgcttccttggtcatcatggtaaacaataacttcccttgcactccctagtcttactgacaggctgggcggtgtcaagagtaataaaactgcctccagcaaagccatgtttgcaactggcgccgcagcatcatgccagccaccctagcaaactcccaaaacctacccagcagccaaagccaagcgtaaagctcagtgaagctgacaagccccaggacactctggtggatgttttgcccccttgagtgtttgctgttttgtgaagaaaaagtgtaggagagttccagctggaactctgcagcaggcaaaagctctttttgttaattcaaaacagtttggaatccatttcagttcttcctaaacctccaagatacgggggaggaaattcactggrttttacaatatatttttcaaggcaaattgccatcgccgtcctaatgacagagaagctgccgatatcactacaacggctgcagatggcaagtcatccagcctcctcctgtgccctcctgagtctggcttggtgacgcaaaccacctcaagggcagctccttctttttccagcagtcccagcactgttccttctctgtgaagccactttggatggctattcttggcatgatcatagacttttctgctgttgagtgggcaaggagaatagggtagaagcaggggaattgttctcattgctatgcatttatagatcaaagaggagcagatattttatgttaattggataacacctagttctatcaggtcagtaacctggggtccctggggctcccccatgggtcataccagatagatagattttttaaaaatttgttggaattaaagtagaatcaaagcctagtgctagcccagaataagttattcaataaatgcttgttgagtgaataatcatccgaaatgattataatactgcctaccattcrttgaaagcttcagtatgtgggagaatctgtcctgggcactttatatacacccataatctgtttggatttcttggtaggaagactacatggctgcatacatggtctttcwttacctccattttatagatggagaaaatggaaatttaaagaggttaagcagtttgccgaaggtcacagagctactaatcggtgaggtcaaggttcagacccaggtctctcagactttaaaactggtgcacttaaccattagactctactttttgcgtattgagatgtggaagcatctcaattaattgcttcagtcttggagttctttggcggttatcaaaaactgcctatttccatattgcctccagatattgtaattaagaatttccaaggccaggcacagtggcttatatctgtaatcccaacattttgggaaaccaaagttggaagatcccttgagcccagaagtttgagaccagcctgggcaacatagggaggcttcgtctctacaaaaaatacaaaaattagccaggtgtggtggcgcatgcatgtgtagtccaagctactctggaggctgaggcaggaggattgcttaagcccaggaatttgaggctccagtgagctgtgattgtgccactgcactccagcctgggcaayagagtgagatcctgtctcaaaaaaaaaaaagaaaagaaaaagaaaaaagaatctccagattatagttcagatattacgtattaatatccaaagccctccttaagacaccattttaatctgtctaacaaaattaacaccctaggttttgacaattgcttgaggagggagtagggcctggtgatagagctaaagactagtgttctggttctttaatttgttcagccagcaggtacctggaaataatgatactgtttgcagaactccccacaaaaatggacagtcaactttaaataactaagtaaacacatctctgcttaatcagataccatcttatactaggttctaatatagataagtggttgcagaaacatttatgagaggaatgttaaattgtcgaaataccatccagtcccttcatttcttcctgcccttcagaaacaaacagaataaccctgatgcagctgtcacggcagaacactcattccagctcacagaacaccagtgttcaatcagcactgagtttgaggagcaccgggtttgggagtattcatctctcttccctgtcccatagctgcccttcaaactcttgagactgttyccagctctaaaatggaaagggtcgtcttctctctggaacaaaagacaggatgtacttgcttgaataggccagtgctttcctggaggaaactccggcttatggagcctctgcttctgcacagcccagtgccttccaccccctsttcatctgctagcatctacattactagttaactggagaggagaccaaacccaaaatattacaaaacatagatattaaaaatactgtgaacaacaatcagcccgctttctcccacctctcctrtaccagctaaatatttacmtccctcatccgtagagggtttttggacaagacaggctggtgcctacatggtgaaagttgtttttctctcttttcttgtaatattgcaaataaacaaggatatctgctttctcttgagcaggacaacagccaaagagtattattgcatagttcctgtcccctatctgggctacgattgtgtctgagagtaatagcacttatttattaactggaagaaattttacaggcacctatgttgtttctgcmtagcttctgaggctcctctcttaggccactcctctcaccatgcccccacagctagttggtaaaatggctttgaataatgactcgctttgagttatctagaaatgtcccattagttcactattttcataaccccatagacttggtttgacaagggtgaggtttatttatgagttctcaactggcacccaatttttaaaaaccacagagctgggggcggggatagaatgatggggaggagatgaaacatcctagaatcatctgatatactttaaacatatacatatacaggcttttgttgtttgtaaaatatagaagcatctttatctgtgactggttgagaaataaaatcccttccccagcccaggcatggtaggttgggatcatcccagtgagcgagcaagcaattggatttgccctcagagactgactatggggtcgaatgctgagtcattcctgtccccacaccagcagtcctggaagaggctcagtcgatcagtcagtgggctgctttctggagcactttatcattttgggctctcacaatgtgtgtttaaactctgagtgaccccaggcagccttccagactggcacagttcaccaagacgttcagacagatcatctgcaagtgaggaagaatgaaaacccagcactggttcaaatcactcctagcagaggtagtgaaggcatcactcagtcctggagaaatcttcggagggctcaccagcrtcacaagtaggtagaccagaagaggcaggctggcccattgcaaagccctggaatcagagggacaggagttccaaatccccactctctctcttcctagatgtgtgcttgcggcaattatttatctctctgagccttaatttccttatcaggaccctgagcaaaccaaataacatgatgtgaagcctctggcacaatgcctgggacatgttcagcacacartaaatgctaattttcccttttgccctatatgatatgatttgaagcagcgccactcartcctgccagtcacattgctggaaatgccaccaacagtcattcttaagatcgcttattacaatataaatacccctaggggatatcagctaatcgctttatcaactatcgctttaaggggattaggtgtggattgagaacaaaacccagaaggaaagagatcctggaggaaggggagggcttggaagtggggaggattcggacgtcctgtggcccccgaaggagacggggaatggcaggtctgctggattcccagccttcaggaattcccatgaacttcttggggacttcatgtgtttagaccatatttagagagcgtgcatgtgttttgagatcacaggtttttctgagagacattgggaaggaggacagcgggggagtggagtggagagaagtcatacctggcagcttttaacttcacttactgcccttcatgtgctgttgccatttccagaagttgagggagtaaggaagggtaggagttcttggtattcccttatctcttcctttccctccccttatcctgcccagagcatcgcagggtagagccaccagayggattcagggcatggagatggcaggttagtggtagacttggaagggatcgttcttcctatttcagcaccacccttcttcctctacctcccaccctgcatttccagccccagtcagattccttcttggacagagaaggagcagaaatgtacgtacatcactaggcttaaggggggactgcagatggctcccctggtcctgacaaaaaggtggggagcaaaccgcatggctggacgtaaattgagtgacctggaatgactagaacgacagggggcctctaaccccagggtgcacagaggtagggacccaagggctttccggggtcggacagaaatctcgggttccattttcactctgagagacccagaaatgacagagcccatgctcagtttccactggtggtgctgttgagtggaggggctttgaacatggcacacaggaaagggttgcccaccctgtcaccagatgggcttgcactgttttgtggtttgggagttgcayattggaggtgggagtggagtgttgagatgaggcaagttgagatgtaatcgctatttaatgggcagatcaragaaaacattggctggtttgatttttattatggttatcccgctccaccatcctggcccagtcatatatattattgttatcaggcatagataggggaagcaattaaatgtgaaactgttatttaaaccggcaagtgtcagaatgttaacccacttcagagcgaaggctctaccagcaacatgtgtgttcastgcagaatgtgctggttacagatratctttatctgtttgtcaaagcatttgcaagatctctattttatgtcatcccctttccctgaaagcagcagcagtaaacgacattgctcctcaaatcatccatggctcagacctctgattaatttaagctggccctgctagcgttcttataaatccccagcaagatgcaggcccaggagtggaaaggggaaaacatccggaaagcagcggggggcagggagggggaaggctgaagggaaaagaaaaaggctgaagggagcaataattgaggaagaaagaataggaaaaatrtagaaaggacccaagaaaatcagagaaatgagaggaaaagaaaggtaagaagaaaatgaggcaagtttacagagcagtaatgaaaatagtaatagctaatttactgtacaacagacactgtgctaagcactttccgtatgtccctcagtcctctgaccaacactatgagttaaattaccgctacagctccaattgttaaagtgaggaaactgaagtatagaaaggttaaggaacttgcccaaggttacctagcttgcaaagttgtaattccaactgcgtctcactcagctggcagtgtgcacccttggccacacattagaatcacccaagagctattaaaaatcytgaaggtcataccccaggcaagtgaatcagaatctctagggatgggtcccaggcattcgtttgcttttttagtctccccagataattttaatatgtagccaaaattgataatccctgcactagacsaagctccgattcaaatttaaatattaagaggacacatgtataactttgctgaataattttttcctatcggtaggatggtgggaaggaattgctataggccrcaccatgatactttgctgaattggatcagaaaagtaccctcaaattcccagcatcatttcttcaaggaagtagtgaattggggcacygtgggttttttgttttgttattgktcttaaaccaccttgcctatgtgcactcaactacaggaacgagaacttgcctgaaaccccaaacgtgtctgcatcaggcattatttttcttgagctcctgaatttctgctctaaccaagaacaactcaaaaaccttcaatttcataactgttgatatgccacccactcctacttacactcctgaccccaaccccatggaaactgcctttattcgaacaaacacaagaattataatatgttctaaagttcctctacctatttcattctcaccatacgcttatgaaagaaatgtcattgtcttgaaaactaagcctaaacccagaaagattagatgatttgtccacaggcacacagaaactaagtggaagagaaacaggactcaagtcttcagtttcccaatccactgcctcctagaacatgcctgtgaactgagggagcagtgcaataaaggaaacttgagaggaagcgcaaaaggaacttaaattgcaaagtactgggttccctaagtagccctgcctcccctccagttttcagcccacacctgaactaaggtctttcattgtctgtggatcaatttacagctgccctgcaatcacatttgttttgtttgtttgtttgttttggttttgaacgccctagggacagtcggtttcagattagtctctatcagagagccaatagggaaagatgcagaaagccaggagagcagctcctagaatagagacaaaaccacctgcattttttctgcctcttcttcaggagactccactgtggtcatctggttccctaattgagacacctcctgagaaaatctgtgctagggaaacacccagcccaggtgggcagatctcaagaggaccagaacrtttgaatctgcttcagataaaccctccacttaacagtaccagatctggacragatggaagctttgtagatttgcccataatccacagtgctctgtaatcaattccaggaccgtgtggatggagaccggaaaggtttctttcccaattcttcacagcctggggagtagggaactagtaattgactccagcctcctcgagtgctaagtcctggagtctgagtcacacacacttcccaaaagggccttctaagcagcctaccccagcagagaggacccttggccctggccctactccagactcaactgtaacctcagcaaggtgcagggagaggatctcaggtgggcctcctggsaacagtgccttttcaggcactaggctgttgggaatggagagagaagagaaaggccctggcactgtctgggtatttggatggatttctgtggcacaactgtggcacctggcttagctcagtaaaggactgagtgtgcgtggagcagaaaggggaaagagactagtggggagctggtgaccagttggagggtggagggtagggaacaaccctggcagatccmktttgcccttgactagagcttaaagaccaaaggaagcgttcttgtttttaagtaagtcaggtgttctaagtttartgttaatatgctttttcaattagatgtttgagtatatttccccagttgaattatgtagagggaattacaaatgagaatacatcttacaatttttgaattagaatctttgagattatctatttagtccggtctgttttgtttagacaagaaaattgagcccattgatcttaatcagtttgcccaaggtcacagagctggtgagtgaaagctttagatgtagaatatgcaacttttctctgctgccctccttccctaaaccatcttgccttaacggaggctcagtcagggggacaatgggactgatctgtaaatgatctaacttgtcattgcagaaaatatacttactccrtggccacaaaatttcagcccttcagccaagcttcatccatcacatcataaagaataacttgccaaagaggggtttgaaaatccaaaccagatccctctccactcctagagaggccagttccatgacactgcaccggagccaagtgtttccagcaagccctgatcagttgcatgttagtccttgtttgtatgataaacgggacctagtagattaacatcatctcctcagcccaagggctgaccccagtggtgctgctcaagaggaaggaggaggctgggagcggtggctyccgcttgtcatcccagcactttgaggggctgaggagggcaaatctcttgagcccagcattcaagagcagcctggaaaatgtagagattctgtctctaccaaaaaaaaaaaaaaaaaaraagaagcaggtggaggaaggaggagctgcagaaaggctccgggagccagtgtctagtaagcagaggcctagcccaggctgagtggtcccagcccaggagggcctctctcggcacctgtctttagatgcacgtctgcctctggcctttgagatgcacacattcatcaagcaggaggatctgtagtcattaaaccaaggtgccagtctggggcccagccttcaatgaagcatcagtggctttttcattcccatagagcaackgcgaggaagaccccatgctcccaggggcccarttctccaggccaggaccagatcatttgttccttctcagaatctgagatcttttgctgatggttccaaaattgaatgctgaaatctaaaaagaaaattatacttactctggtcaatgggatatgttggagacctgagagtgaaaaaatcaaactgaagaccagtttccttctttaatggaagaaaagtaagaaagttaacttagaagaatatttagagttctgaaaatcccactctgagaccactctgccatctcacattgttctcttgagccttatctcaatggataaaggtcactagagtttattagacacaggaaaacatcgtttacrgacttcttcattgtgtagggattctgccttcaggcctgttcaccagccaggagaattgtgctttttgatccagggctcttggccagaacagccttctcgctcattaactcagtcaaccaaatgcttcctgtgtttccactggtggttcagaacgtagtctctgccctctratacctcayggtctaacgggggagaaacaagaaagtcagaacttacaatacaagataataaggaataagagcagagcctttggaaccagacagacttagatccaaatgtcagctctgcatttactagcaagtggtctatcttggtaagatgcaactyttttctctaagtcttaatttctccctctgtaaagtatgacctcatggggttattgtgaagattaaatggcatatcgtatataaggcccttggcacgatctttggaaaataataaccattcagtgaatgtaatctactagtatagtagcgattgaggtgtttatagggtgctatgagggcccagagaaaggagatgagatgaacaggagagaggaagggatactgttgaggaaggatttcaggatggaatcccaccacaggctgtattttgaagaaatggttgaagtcaataagaagagtgaagggaaggtgagaatgtttcaggcaggaagaataaaatctgaataagtgcagagtcctgacagaacatagggtgtttgaggaacttggtatggaaatagattaatatggcttaacatggagcaaaatgaaacagaactgagactagaggatgaccaggaccaggtcatgaaggacattaaaggtgggtaaaactcataccatgaaggagagaagagttacagtttttaaaagaaaataaatagccttcaggagctcaaatttgaaatcaatacgagatagatgatcaagtgaatgttctgtcttcttgatgagcctgactgagaaaaccttataatctaacccaaggcaacaaactgagaaattagaaaataaaacttagagattagaaaacaaaaactgaaacccaaactttttacttggaaatttaaaaacatgcttctatataactcttaggttaaaaatgaaatcaaaattgtaagacaagctgtttagaaaagaactatgagagtaccgtttatcaaagcccatgggatgaaaccaaagtggcactaagaagaaaatgtggaggcttcaatgcatttattagaatacaaagaataccaaatcaaatgaattaagcattcaactcaagaaaactagaaaaagagaagaaagtaaacctaaagaaagttttaaaaaggaattcaataaattaaaaacaaaacacacaatttttaaaaacagacttgattaataaaaccaaaagctatgtcttttttaaaaaagcaaaaaatagataaacctttgacaaatcagatttttttaatgagagaatgcacaaataaagagctctaagagctgggcayggtgactcatgcctatattcccagcactttgggaggctgaggcaggaggattggttgaggccaggagtttaagaccagcctgggctacgtagcaagaccccacctctacaaaaaatttcgaaattagttgggtgtggcggctcatgcctatagtcccagctacttgggaggctaaagcaggaggatcacctgaacccaggagttggargctgcagtgagccatgatcatgccactgcactgggcaacagattaagactctgtcacaaaaaaaaaagcrttaagttaaggagcgtgaataaaaataatacatttcatattctaagacaatatcatctacaactttattccaatataaattactaaaactttaccatataagtagtagaaagcctgaatagataaaagctatggaagaaaaattaaagatagtgatagatttatcaccaagctcagatggttctgcaaacaaattctaagaaaccgtcagggaacagatcattactgcgttgacacagaaggcaaacctctcaacttggtgtataaggctagttaacattgttactaaaacaggcaaagaatggcccccaaaataactctaaaccagtatcacctacaaatacaaaaactctatataaaatattagcaagtgagtacaagagtataaggaactctattaatgtaattcactgtgctaggttaagataaaaccataactcttcagatatcatagctctttagatagaaaaatgtaaaagtatttgataaaaattcaacaacattcctgactaaaacaaattaaaattktaaaacccctggaaagccaggagtaaaacatgttctccataatctatagcaaacatcatagttgctgataaaccattagaagcatttccttcaaagttaggaataaaacaagaattgctactattgctactattatttaatcccatattggaggttttagccaacacactatggcaagaagaggaaatgagaaaggttaatgctgcaaaagaagaaataaataaagctaccattgctgatataattatctatccaaaaaaagtagaaatccatgattaaaagctatttgaactgataaaagttcagaaaattggaattgtttcaatatactaaaatcaattagttttctgcacatcagtggggatatattagatgtaatgaaaatgaagggtccattcacaatagaagctataaagtatttgagaataaatctaacaagatctacataaagaaaaaagtaaactgcttaaaagtaatttaagttcaccatttgcaaattgaactaaagaaaaatctaaagaagaactagtgaaaattgcttgcaatcttaccactgaaaagaaacctctgttaaaatgtatcagtattttaaaactgtgttttgtcctttggaaatatgccatattaagcaaacatagcataagcaaattaagcaaaaagacaaacctttttttaaaagcatatttgtgaaaaaagcatatttgaagctatgataagaaactgagtagaagctataaaacgtagattcatcaggaaggagcagaagttgaaaaggagatttctggctgggcacagtggctcatgcctgtaatcccagcactttgggaggccaaggcgggtggatcacttgaggtcaggagtttgagacaagcctggccaacatggtgaaaccctatctctactaaaaatacaaaaattagaaaggcgtggtggtgagcacctatsatcccagctactcaggaggctgaggcaggagaatagcttgatcccgggaggcataggttgtagtgagccracgtcatgccactgcactccagcctggatgacagagcaagactccatctcaaaaaaaaaaaaaaagaaaagaaaagaaaaggagatttctgagtagaaacaygttagcagaggaaacttcatttggggaacaggattgttttgatgccatgctccctcagctgaccacacagattmcatcctggccakaaaaaggccctgcaaagagctctgatcattttggttctgattccrtccttagttcttacccattatctgcttacccttcctccccacctatttaagatacaaagcaaaacaaaccaaaaatacagatgagttgcttggtagagctgcctaggcctccaaggcggggcccagaggattttttgactgaaccccctgttgtgttttccatatgtgcttccccagaccgcccaggtttgctgaatgtgaagcccattgaagacattcaagacaacctgctacaagccctggagctccagctgaagctgaaccaccctgagtcctcacagctgtttgccaagctgctccagaaaatgacagacctcagacagattgtcacggaacaygtgcagctantgcaggtgatcaagaagacggagacagacatgagtcttcaccygctcctgcaggagatctacaaggacttgtactagcagagagtcctgagccactgccaacatttcccttcttccagttgcactattctgagggaaaatctgacacctaagaaatttactgtgaaaaagcattttaaaaagaaaaggttttagaatatgatctattttatgcatattgtttataaagacacatttacaatttacttttaatattaaaaattaccatattatgaaattgctgatagtatttgaagactgagtcttgtgtgtttcccaccctagcccccaggctttcttttttaccccttttccttctcccctccctccctccatccctctcactcttcctccctcccttccctcctttccttcttcctttatttttcttttctttcttagacattttaaaatatgtgagtggaactgctgatacactttcattctcagtaaattaattttttactcaatttacaacttttcggaactctgcatctgctttaacaatcagaactaagaagggaaggggaacttcagaatcagaaactgctcagagcatgtgttttgtagcctggatgtgctgatatgcagcatatccctgggattacccagaattcagtcttcttccacaatcctaaccgagattttcacgcaccaccagcagcctactcgtatactacctactaatcaatgccactgcgcacccacagagccagtggccagcaactgagcactgctagaaactctggggaacacagaacttttttaagatttggtatctgcgccaggcatggtgtctcaagcctttaatccacgcacgttaggaggccaaggtggatggatcgattgagctggtctcttgttcgagaccctgtctccacaacagttttaaatattagccatgtgtggtggcacacacctgtagtcccagctactcgcaggctgaggcgggaggattgcttgagcctgggagttgaggctgcagtgagctgtgatgatgccactgtattccagcctgggccacagagtgagaccctgtctctaaaaaaagataaaaaagatttgacacctgccaaaaagaatttaccgattataaactgaggagaaaagattaatcttttttcatacagattcaaatacgcagatgaaatcacatgccaggtgaatggtaagagtttgtaggaagtaagatgagtgaagattggaatcccagagactgaatctgtggatttgctgaagagggcctcagggaagtgttagactggaataggtagagaggaggagaaaagacattccagagaagcaaaataacaggaacacaatgaaagaaaaaaaaaactgagggagaagagctactttctgttttctccttctgcaaggcagttttgctgtgattattcctgtcctcctccttgggaccactctgtccagagatctcttttctgaactgagaggctaactatccgcatcattaatggaatgcttgcctcccaagcagatagattctaagttccctgaaggcgtgacaatctattcattcttggcacagtgaatagattcgttgattcaatccaccaaattcacttgcattggctactcatgaactcatcatactatgtctttgaagaatgccttacggggtgtctaagggagagaatagagtcatgggttctccatttctgtttctgactgggccaataaagccccttcctcatccctcttttccacttaccactagggacagaaattaaaaaccatggcttcaggctactaaaagcctaaaccaaaccaaatcaaaccaaacaacaacaacaaaataaggcaggttggacaagcttacgagtgtaaccaaactatctggaggtgtctgttgtgcgggacgcttatttccactgacctaaatttccctgccacttctcccttaatttatcttgccttaggatatttacactcaggagacataactgcagacttgaggttttcaagccaaaatatcaagaaagacctgttcatcttttgcttaaaaataactatatctccaaagaatcaggttatagaagtgagtactgaccccagccctaaaaatgtaggattcctaacccttcaggagagacctttctgagctcaaacctttaggatgacagatagacaaagactgaagccattgtctaagtaacaccaaaacatttggaaggaaagtgacaaattcagtcagtcatatggctctttttttttcttccttgatgccaaacatcaggatattttgaaacttattttcaaacacccagatgactggctagagtcttctgtgtagagagctgatggtcagggatctcttggaagagagaatgtacaggcagtagacaagatagagtccacttctgaggcgctcccttatttacaagctttcttgaacaaaaagtctttcagccccgctgcctggtctcagttcccaccagcgctccgcagcccatccaagcctttccacattatcggagctgttgctgccaatggaaggaggaagagaaacgctctcagctctctggcactgatggttagcattaaatggcttttaaatcctggcagctttcaaattcccatctctgactttttccctgtggcttggaagatcatttgctaaatatttgacaacactttatattcagcctccaaagctcctgctcctttctccctctttctctcccccaggatgaatcataagttaacgaatctgtcatcagttattcatagtactttctctggacacaaacacaygtagggatgtgtgttaataaaaataggaagaaaagtaactttggtcaagagtcaagaaagggtttccaggctcccacaagagccctcccccagcacctccctggaacgggctcccttttccttcctcccgctgtgtgtggagcccaggaacgaagaggggacacacagaagaaacaaagctgcacaccctgtttctccagccgccataagaaattaggctggcctgagtttctggctccttttttacaatgtgggtgcagagcaaggagcctaggaggctcagggtcggaagaggtggcagcactagctgatgtcacatagcgaatttccaactagaggaagccagaggggcagcttcaccacctccactgaggggcaaagagggaaggggacagaggcatctgtggcgggctttcttggtggcttctggactccagtgactttttcttggctccctcgaggctaaaaagcaggtattttcctggacaggtcctccttgcttgacatcacccgctgaccgtgtggtgctgatggaaagagctgggtgagagaggggctggatgttggcctctggatacccattcccttggaaatacctagtggagatgggcgggtgcggggctcctaattctacatcctgagagaaagaaccaaagctcatttccaccatgcccatccccattgctttctggtcccccttttcctactcattcactccaagagtttgggttatgagacaggaggaccaagatgcctgatggtcactaggtggccccctccctaccttctgctcaccccctcatcctggttcttgacctcagcccctggctgtctctgcatcatgaatgttgttatttgcacgtctccaccctgaccgtgggattgcacctggtacatcctccatttaacaccaactgaaaagaaatagcagggttttaagaattcaaaagatcatacaatgtcccagagccccaccgcattcattaaacacataatccatactccagtcatgtctagcaggttatgatggtgaccgcgactaggccctgctctcaaggggggcacagtctgtggatgagtagtcacagctcagcagacgcaacaagtgcctagagaggtgaaaggatttgcagagcgtgtgcataggcccaagagtgtgaaattctccaagcgttcagaaaacggccaggtgaggggcgtggcccacagctcccaggctaaaatgtggatgtggccagtcagcggcaaattgtgggagccttgtcctccctgacgaggagctctctcgggctgtgttggtagcaactgggatccggggatgctgccaggcagaagagagacatggtcaaatttgcaatttggaaagtcagcgccccgaaagtcaacactccccaaagtagaaattctctctacaatgctcctgatggttgcccaacccacagacaactactgaagagacaagaagctctctcccctctaaggccctgggtgatttccaccccgcaggcctggctctgcccctgggctcacacttaccacatgcttgctcctgcaccctgggggctccagctcacctccttccctttcatctggtcgcaatatcttgcctcaatcataaacagcttaaggacactggccctatcccctgttgatatccattccctaccgttgctcatattgccccaagctacaaaggccctctgcttccaggagcttcgtttcaccttcttaatctaattcatggagatctcatggtcatttttatccacatatgtcaaagcctgcctgtcccatatctcatgtccagaaaaggcctgcattggtcatagacctcaagaaaattagaggctgggcacggcggctcatgcctgtaatcccagcactttgggaggctgaggcgggcagatcacctgaggtcagaagttcaagactagcctggctaatatggtgaaacctcgtctctactaaaaatacaaaaattagctgggcatggtggcgtgtgcctgtagtcccagctactcaggaggctgaggcagaagaattgcttgaacccaggaggcagagtttgcagtgagccgagatcgcaccactgcactccagcctgggcaaaagagtgagactctgtctccaaaaataaaaattaaaaaaaagcatattaaaaacaaaagagattattatataagacacttagaactgtgtgtagcacacagtatgtgttcaataaatagcaactattattggagacggcaccctggggtggaatgcagagttacgctgatttgggttaaaagtctaacttcacagctatggttctaggtccatatggctttggccaatctcttaatctttctaggccttaattgccctcatatgtaaaatgagataatatccaccttagagggctgttatgaggcttaaatgtaataatggttgtaaaacacttcacacaggttcccggtacatccaaaccagtcggtagtgttggctgcgggtaacgttattgccgcggctgttaaagtgccccacctttaaggaggcattctgggcccacgggacaggtcttcctgtgcaagtgttctggacctcacctgaggagcctggaaactcaaagccgggattgaatttggcacttggcagtagagtaaaaatacattctctcaaaagattttgcctccaatctataaggattaggagaaaaaaacagtatttgaaagacaactgctgtgttctgatttagaacacatgctcaggatgaggctacaaaaacattctctccccaagtagtgggacttttctcttgtgacttacactcctaattttagmctaatattacatagttggaatttccagaggggttataaagaataagaaaattgctaatttgagtctgtagggagtgggttgggatattttcatcccctccggagctgtgtaaatatgttccaggccaaaagttcccaggagagtgtcattcctggggtctatttagtgccaygggcttgactcaaggaggatcctagtggcttcccgcaagagttggaaaattgtgatcccctggccatttttccacaatactggaagccggaaagtgtaggttagagcccccattgtccgtttgagacttagcactgccattttctatgtatgtggccttgggtaggtcactttcctctctggggacatcatacctggcctgtagaactatctcagcaaattacatctaattccttcatgatgaatgggcctcagtttccctagccataaaatgggaatagcagcacctaccctgcatgttttatagagtaaatgaaaaaaagcagggcaagcctgatcactactctttacagataagaaaggcccatagaggtgaaggagctaggccagaaaaatggagaggcagggctgaggctggacctcaggcttccagaggcccacccctgctagggctctttcttggtatgctgtgctg

SEQ ID NO: 8779 - DNA, 45938 bp, Homo sapiens
  misc_feature (1)...(45938): n = A,T,C or G, or insertion/deletion polymorphism (see Tables 1-2)
gtggcgcaatctcggctcaccgcaacctccaccgccccccacccacccagttcaagtgattctcctgcctcagcctctcaagtagctgggattacaggtgccgccaccacgcccggctaatttttgtatttttagtggagacggggtttcaccatgttggccaggctggtctcgaactcctgacctcaggtgatccacccgccacggcctcccaaagtgctgggattacaggtgtgagtcactgagcccagcctctttttttttttttttttttttttgagatggattctcgctctgttgcccaggctagagtgcagtggcgtgatctcggctcactgcaacctccacctcctgggttcaagcgattctcgtgcctcagcctcctgagtaactgggactacaggcacgtgccaccacgtccagctaattttttgtgtttttagtagagacaggtttcaccgtgttagccaggatggtctcgatctcctgaccttgtgatcctcccaccttggcctccaaaagtgctgggataacaggcgtaagccactacggccagcccgttatttcttgattatatgctaaacaaggggtggataattcatgagttttctaggaaaggggtgggaaattcctggaaatgagagttcttcccctttatagaccatatagggtaacatcctgacattgctatggcatttgtaaactgtcatagtgctggtaggagtgtcttttagcctgctaatgaattataatcagagtataatgagcagtgaagacgacctttcatcgccgtcttggttttggtgggttttggctggattctttactgcaacctgttttatcagcaaggtttttatgacctgtatcttgttccaacctcctgcctcatcctgtgactaagaatgcctaacctcctgggaatgcagcccagtaggtctcagctttattttagccggcccctattcaagatggagtcactctggttcaaacacctctgacactgactctttaaaaaaaaaaaaaagtgaagggtacagtactggagtcagaatgctttgctcaaattcttctgatggcacttattagctatgtgagcatgggaaaataattttatgtctctaagccttgcttttctcatctataaaatgcgaataataaaaatacttcccttagaagaatgaaatgagataatctactgtgtcatgcacagagtaaccacataccgcctcaatcttttttttttttttttttttttttttgccctgagacttagcagttgaagatagaagtgaaagattttctctgtaggtctgaatataaattcctattccttccatatccagttataaagggttgcagctacagccctcccacgacatttctattagaaataaatcagattaaggcctggctcagtggctcacgcctataatcccagcactttgggaggccgagatgtgcagattggttttgtttgtttgtttgtttgtttgtttttaattttgagatggagtctcgctccatcacccaggctagagtgcagtggcgagatctcagctcactgcaagctccgcctcccgggttcacgccattttcctgcctcagcctcccgagtagctgggactacaggcgcccaccactgcgcccggctaattttttgtacttttagtagagacggggtttcaccgtgttagccaggatggtctcaatctcctgacctcgtgatccgcccgcctcggcctcccaaagtgctgggattacaggcgtgagccaccgcacccggcccgagatgggcagattacttaaggtcaggagtttgagaccagcctggccaacatggtgaaactccgtctctaccaaaaatacaaaaattatctggtcatggtggcatgcacctgtaatcccagctacttgggaggctgaggcaggagaatcacttgagcccaggaggtggaggttgcagttagctgagatcacaccactgcactccagcctgggtgacagagcaagactccatctcaataaataaataaataactacataaatacataaatcagactagcctgggcatggtggtttatgcctataatcccagcactttgggaggctgaggcaggaggatcacttgagcccaagagttcgagaccagcctgggcaacacagtgagaccccatctctacttaaaaaaaaaaaaaaaaaacaggtgcagtggctcatacctgtaataccagccagcactttgggatgccaaggcgggcggatcacctgaggtcaggagttcaagaccagcctggccaacatggtgaaaccctgtctctactaaaaatacaaaaattagcctggcgtggtggtgggcacctgtaatcccagttacttgggaggctgaggcaggagaattgcttgaacccaggaggcagaggatgcagtgagctgagatcatgccactgcactccagcctgggcaacagagggagactccgtgaaagaaaaagagacagagagagggagagagagagaaaaatcagactaactgttttattttgtgctattgaatttaggtgctgaaaatatcaacaaaataacctgttgataaaacaaagtctagtttatccttactgcagtgagaagagcactactttgacagagttgtggaggctcaaagtagggagcacatagtggtatatactgagtctttgaaatttggtttaagtgtaggctctttcaatgcgggttgggggttgattaggatggggtaaggatcatgatacaatcatttaggactggtagacacaacagagtattttgaggccagcggttgtataaacacccaacgagttcttgtccactgctcagagagagccaatttatcaagacggggaattgtaatagggaaagagtttaatacccatagagccagctaaatgagagagcagaattttattattattcaaatcagtctttctgaaaatttggaggctgggttttttaaagatagtttggcaggcagggggctagggaatggatgctgctaattggttggggatgcaatcacaggggtatggaaaatatttcttgtgtgctaagtctgtttctgggtggggagtcacaggaccagttaagagtcctgggttctggtggagccatctgattgtcagaaatgccaaagtctgaaaggatctatcaagaggccaatcttaggttctacaatagtgatgttatttatgggagtaattgggaaagttgtaaatcttgtgacctccagaataatggctggtaatcatttaactatgccaacacgttagcagaattcaggcccctctcataattctaaatctgtggccttttattagttttataaaggcaagtttggtttttttttatttttttctttctgagacaaggtctcgctctgttgccaaggctcgagtgcagtgtgcaatcactgctcattgcaaactcaaactcctgggctcaagtgatcctcctgcctcatcctcctgagtggatgggactacaggctggagtgcaaaggtgcaatctcggttcactgcaacctccgcaatcttggttcactgcaacctctgcctcctgggttcaagcgattctcttgcctcaccctcccaagtagctgggattataggcgcctgccaccatgcccagctaacttttgcatttttagtagagattgggtttcaccatgttggccaggctggtctcaaactcctgacctcatgatccgcccgcctcggcctcccaaagtgctgggattacaggcgtgagccgccatgcccggccagccttcatttttaatttactgaaatagttatcatgttaatgtagacaataagctgtgtgggtgcagatggttttcattctcagtgcttttagaaaatctaataagtaaaattaagggaaatgtatccaggatactgagggcacttgtccctgcagaccgagtttaaaatggaagatattattttggtaactcagaaggtgatttgaactttagacggatgacccacttcctggcttactcatcatttcccaccatccgttcatctcagttgaatgccaccagtcttgtgaggaagcagattaggaatgctcattcccgctgggtgtggtggctcatgcctgtaatcccagcactttggaaggctgaggctggtggatcacaaggtcaggaattcaagaccagcctggccaatatggtgaaaccccgtctttactgaaaatacaaaaattagccgggcgtggtggcgggcgcctgtagtcccagctactcaggaggctgaggcaggagaatcatttgaacccgggaggtggaggttgcagtgagcccagatcatgccactgcactccagcctaggcgacagggcaagactctgtctcgacaaaaaaaaaaaaaaaaaaggaatgctcattcccctgcctgagatggcacagaaaaatttctttccacatttaaacagtggaagaaggggcacttccaaatttaatctttcatagacagcatatacagcatttaacatcttctggatgttaaagaaaaaaatattctgaaacttgttaaaatggcaaggaagaatttattcaggaccaaaggggagattatgctgcactctgaatacaataatgacaagtgggatttatagccaacaagcagagtgaggggtcactgcatggaaaattactaaaaggagattcttgttaaaccaacttaacaggactcttgttgaaggcaggccagggttattagatattaaggatgggggattttctttaaattgacttagcagaattcttttcttactgagtttattctttttttttttttttttttttttttttgagacagggtctcgctctgtctcccagactggagtgcagtggtgtgatcatggcttatggcagcctccacctcccaggctcaagtgatcctaccacctcagcctcctgagtagctgggactacaggggcccaccgccacacccggctaatttttttattttttgtggagacagggtctccctatcttgtccaggatgatctgaaatttctgggctcaagagatctcccacctcggccacccaaaatgttgggattacaggcgtgagctactgtgcctggccatgagtttattctcttttttctttttgagacggagttcaaggccagcctggccaacatggtgaaaccccgtctctactaaaaatacaaaaaaatgagccgggcatggtggcgggtgcctgtaatcccagctactggggaggctgaggcacgagaatagcttgaactcaggaggcagaggttgcactgagccgagatcgccccgctgcacaccagcctgggcaacagagtgagaccttgtctcaaaaaaaataaagactcttcgtgaagtagtgttaagtggacccaggagaaaaatgaagatgacctcttaatggcccttcaaatgtataaagctttctcattcagggaagaaagacataaagatgtagcccaggcgcgatgactcaggtctgtaatcccaacactttgggaggccgaggcagctggacctcttgagcccaggagttcaagaccagcctaggcaacatggcaaaaccccatctctactaaaaatacaaaaattagcctggcgtggtggcgggcgccgtatgggcaccatggttgtcccagctactcaggaggctgaagtgggaggatcacctgagcccgggaggtcggggctgcagtaagccgtgttcgcaccatggcactctagcctggacgacagaaaaagaaaaaagaaataaaggtataaaagaaaaaaaagaaaagtaaacagcttcttccaggggatgaagtaggtttatttcggtgagattgctgctcaggacttaggagagccatcaaaggcagaagaccgctcctggggcccggtcacctgaacactacaagtcccagcaagcgccgcgcgggggcggggcttgctgaccgttgtgacgtgtgggcggggcaggcgggwcgggctctcccttgggtgcttagccccgcccccgtcccactctgccctgttgctgtcgcgccgctgctggttgctgtccctggtgagtgcctcaagtggaaaggggcagttaggccctcggggtgcccacattcagacttgcagtcctgagaaggggccacgggggtagaggtgtggcaagtttcggttctcaccgcagttcaccctctggggtgatagtgggagtggtgttctgaaggccctggagcccctcccgcggcccgggagggttgcggggcagttttgtcttgcggagggcagcgctgcagtgctgtgtggcagggtgggaggctcctcgggaagaagtgacacccctggcggcggcgagggtcttgaggcggcrgctgccgccccacgggtcgtggcgtcccgtcccctcccgcgggcccaggctgtggtggttccgtaatccctcgcctggatgtcatcgccgttggcttcgaggcggaggtggagccttgttgcgtcaccctgagcaagttactttctttttgggcctcagtgtccccctttacgagtaggtttgatccctgaagcgccttgccttttgcatgctgcagctgtcggagaagacgttctaggcaggaggaaagacggtgtcgtgacctgcctctacagttaatccattgcccctccaccactgacccagcttagtttgggagctaatgttcccactcgtatattatttcaaccccactggacgtgttaactcttttctatcacttggattcttgcttcacatgcaagccaacaagtgaccatggttggagctgagtaaaatatggataatataacttattctattattggaaacaccattgcaagtaaaggactttatgtggtaggtctttgtagcttgtggagaatacatgattaaggaatatccagatggctcagtttcccaggtattttcaagggacctggaaactctatcctttggcagacatgacagctgtggaatggaaagggccttgaaaaaggtagtcgataatcctgagttacctggcactaacaggtcatattgtctttcgagtcagatagtacatctgtggctctttaaaaatttaatttggctgactaggcgcggtggctcacgcctgtaatctcagcactttgggaggcccaggcgggcagaatcacctgaggtcaggagttcaagaccagcttggcaaacatagcaaaacgctgtctttactaaaaatacaaaaattagtggagcgtggtggcgggcgcctgtaatcccagctacttgggaggctgaggcaggagaatcgcttggacccagacagcggagggtgcggtgagccgagatggcgccactgcactccagcctgggcaacagagtgagactccgtctcaaaaaacaaacaaacaaaaatttaatttggcagtatgtattgatagaatgtcatgtatccttaattatttttagatgaaaagagagttaaatgaactctttcacttcttttttccttcacttaggatcatcattatatcaggcaaggtccttgaagattttctagccttagccatgcattttgctgatgaggaaacaggccagaaaagggtactgtgacttggccaagctctcagagtggcagaactaagataggaacccagctcccttggctgttagcctagtcccctttccaccacacttcaaacactgtcactgcccatgtcacagggacatggcatgttagaatcacccctgtcaagggaaaagtggatggtctcagtaaaatggagattagtacacagctttgagcctttcagagtttccagttgcccgcacctgatgtcccagaactattttttccatcttcccctagaactggcgccagcactatggtggtgtggatgtgagatgagggcctgtttagaaaaagctggacagcaaattcaaacaattgttaatgagtagtaataaaggcctcctggggtgtaaaatttttgtaagacactctgaaacattttcatattttaggtaagggtctagaattaacttggaaattttgggctagagcaaatggctcgataatttgaagaccagtgattgtgtctttgcttttgctacctgtttcagggccatctacacacacccatagtatccactgctggtattctttaaggctggttatgtgtaagcatttctgccatrgccagggagaaacgggattcaaatcaattcatccatttttgctaattgctaatcgtttagaaagaaaagtaagcagaaggccgggcacagtggctcacgcctgtaatcccagcactttgggaggccaaggtgggtggatcacgaggtcaggagttagagaccaacttggccaacatagtgaaaccccgtctctactaaaaatacaaaaattaaccggacatggtggcacatgcatgtagtcttgggaggctgaggcaggagaatcacttgaacccaggagacagaggttgtggtgagctgagatcacaccactgcactccaccctgggcaacagagagagactctgtctcaaaaaaaaaaaaaagaaagaaaaaaagtaagcagaaagataaaggaatccaattaaattgggtttgacttttatctttgtttttactgttctcaaatgaagaattgatttgcatgtctttcttgcctgtagaagcatttgatttccttctgtgaactaatctgtagtcttcatttctcttgaaatatatgcccactggtataaaaaaggctaatgtaaacatgttggccatttaaaaaattttctgctaaaaaacctatcagtgtagtttgcagatgcagttagaaagagcagaagtaggctgggcacggtagctcatgcatgtaatcccagcactttgggaggccgaggcagatggatcgcctgagtccaggagttcaagaccagcctgggcaacatggtgaaaccctgtctctacaaaaatacaaaaattagccaggcacatgcctagggtcccagctactccaactgaggtgagaggattgcttgagccagggatgtcaaggctgcagtgagccrcattcatgccattgcactccagcctgcaagaccctatgtcaaaaaaaaaaaaaaaaaaaaaaaaagcaagagcagaagtagaacaggctgctgttccttttcttcaggaagacataagaggatctatgtcctcatggaacagccctgggagtagtatattaggcttgaaaagctcattagatgaagatgtgtcaggttttcttggaagctaggagacagttcaggggactcatttaaaaatactttcccattattgcctgctcctctgagggccctaatccttttggaaactgagctgaaaaaaggtaatgactatgtcagaggccaaataaagttgcctctgacagtttgtggaatttgtgcattattttacccatgcttgatagttttgtttttgaaaatccctatttgttttctctgttcattccttatgtggccaatctttgatttgagggttggaataaggaattaggtaaaataccactttataatttctaggggacctagctcgtcccactaatttttcataactcagcagttctctgggcttctaaatttaacttttgctcttatatttcttctcttttctttacctctatgaattgctgccaagttagaaatggatggtagacaggttctatagtgggaaaggtggttaaaggaggggaagttgatgcttaagtcattttaattttcatgggccaggtgtagtgactcacgcctgtaatcccagcactttgggaggccaatgcgggaggattgcttgagtccaggaattcaagaccagcctgggcaacatagggagaccctatccctacaaaaatacaaacattaggtgggcatggtggcgcatacctatagttccagctacttgggaggttgaggtggagggtcacttgagcctgggaggttgaggctgcagtgagccatggctgtgccactgtactccagcctgggtgacagagtragaccctgccccccccgcaaaaaaaataattctctttacatrtcttccctcccctgtccacaaatactcatttctagactactttgtcagaaaggtaatttcccaagccattgttggagcccatttctcccaggaattttatcactgggaggaaggraagactaaagattactgacctkaaaactcagtagatgccctccctccaggaaaagctggaatacttcctcactgaccaagttcgggttggcatggttatgttctagtttactcatggccctttgtgtccacagcttggtaaaaaggagagaagagaagccactgctgttctcatctacttgcctcctcaaacccttccccagccttggcagaggagaattttaaccttatttcaagaatgattgagttctcaatacctcacatgccattggatgccctctgagtcccttctgggaaggtgatgagatttctgaaatgggaaactccatggggtcttttgcatttttgataagcaaggaaccaaagctgttcacttttccagacagattattaggttttcaggtgaatgaaaatagctagaatttcctttgactatacactcaagcctcagaacatgagctctttcgtgttgtctatatatgtgctgtcctttcttaagcgttctgcttatgagctaacttagattggttgtttttcttttcttttcttttcttttctttttttttgagacagagttttttgctcttgttgcccaggctggagtgcaatggcataatctcggctcactgcaacctccgcctcctgggttcaagcgattctcttgcctcagcctcctgagtagcttggattacaggcgcctaccaccacgcccggctaattttttgtatttttagtagagacagggtttcaccatgttggctaggctggcctcgaactccttacctcaagtgatccacccacctcagcctcccaaagttctgggattacaggtgtgagccacggcacacggccagattggttgtttttctggtaatgaaagagaaactataccaagctaccccatgcccttagctggtcttgcctttcagagtagcatccattttcacaacagcttgccagagtttgagtgtgtgtaaggtaggtaatggagtgtgaatttgatgggttcttaaggaaatcaaatctgttccttttggttttttggcaccatgccacttgaaccagccatgccagctgaaccagccataccaagaagtgacttagcacttggagattatcatctcctcaccctattttagaaaagagaaagctgagaaacagcagtttctccaagggtcaacaacaaattaagagggcttaaaaaaataaaacatacacactcttagccccagagtcacccttaccattgtttacctacaaagccccttccttttttactttttgatgaatgatgtgcatatcttgttagttcatttatccaacaaatacttaatcagtgattactacaccttaggcattgtgttatgtatacaatggtgatagtgttgtgaaggaaaagaaatggggataaggtacttggtacctgtgtacaatgagggtttctcttggatgctatgggagaatgggcagggaggtttctcagcttgcagaccctttatttccaagtggtctactgacatatggaggccagcgtatgaggggcagtcccggaagtcactcttttttttttttttttttttggagatagagttttgctcttattgcccaagctggagtgcagtggtgcgatctcagctcactgcaacctccgcctcccaggttcaagctattctgcctcagccttctgagtagctggaattacagatgcatgccaccacacccagctaattttttgtatttttagtagaaatggggtttcaccatgttagccagcctgctcttgaactcctgacctcaggtgatctgcctgccttggcctcccagtgctgggattacaggcatgagctaccacacgcagcactcagaagaacactcagaacactcttatctgagtgttcttcatgatccgcaaaggacaagttaagtaattttacacgcacagataaattggtgctccaggcttaggacagagggatatgctggcctccatatgacggtagaccacttggaaataaagggtctgcaagctgagaaacctccctgcccactctctcatagcatccaagagaaaccctcattgtacacaggtaacagtttattatagggaaaaatcttgacctagactggaatgtgaacattcccccaccgttgaaaaactcttttgagccgggcatggtggctcatgcctgtaatcccagcactttgggaggctgaggtgggtggatcacctgaggtcaggagttcaagaccagcctggccaacatggtgaaaccccctctgtactaaaaatacaaaaaattagctgggcatggtggcgtgcacctgtagtcccagttactcaggaggctgaagcaggagaattgcttgaaccccagaggcggaggttgcagtgagctgagataccgccactgcactccagcctggggaacagagcgaaactctgtctaaaaaaaaaaaatggaaagaaaaacttttgaggtttgaggttgaggatgtggctaaactgtgtcacaaaccagaaagtcaatgcattttttagttccttaactcaatttcaagaatagacagtttagtgctccaaagtcctgttgccttctttatgaaaaaactgacttctggggagttggaagagcaggcctggttgcttagacttcaaagtaaaaccagtaaatagataggatggggctagaataagtattatggttgtttgggaggtcttgtttttttggttattgtacttayttatttttaaaaattatatgtgtgccagccgggcgcggtggcttacattgaagcaggaagagccacagacaaaactcctcagacaccgagttaacgaaggatggggtttattaggccgggggcatcagcaagactcctgtctcaagagctgagctccccgagtgagcaattcctgtcccttttaagggctaacaactctaagggggtaygcgtgagagggtcgtgatcaattgagcaagcagggggtacatgactgggggctgcatgtgtcggtaattagatcgtcacaaaacaggatagggattttcacagtgcttttctatacaatgtctgtaatctatagataacataaccaattaggtcaggggtcgatctttaactaccaggcccagggtgtggcgccgggctgtctgcttgtggatttcatttctgccttttagtttttactttttttttctttggagacagaaattgggcataagacaacatgaggggtggtctcctcccttaatgtctgtaatcctagcactttgggaggccgaggtgggctcatcacgaggttaggagatcgagaccatcctttctaacacggtgaaaccctgtgtctactaaaaattcaaaaaactggccgggcatggtggcaggcgtctgtagtgccagctactcgggaggccgaggcaggagaatggcatgaacctgggaggcagaggttgcagtgagccgagatcgcgccactgcactccagcctgggggacaaagcgagactctgtcttaaaaaatatatatatatataacaattacatgtgtgcctgtatgtgtacacaatcttccagcatataccaatagctgaatttgtaagatattatatagtatttgcatgtgtatagctctttcttcatcttctgtgtacaactgaaatatttttttcatgtcctagtaaaaccctaaattgagaattacggactcactaaatgttagaccagctagtcatttagaaaacagtgcatgtgatttgtttaaggggcaggaagtattaggtgtcaacaattaaaatcactttgtttcttttttttttttgagacggagtctcactctgtgtcccaggctggagtgcagtggcgcaatctggcaatcttggctcactgcaaactcggcctcccgggttcctgccattctcctgcctcagcctcctgagtagctgggactacaggcacccgccaccacgcccggctaattttttgtgtttttagtagagacggggtttcaccatgttagccaggatggtctcaatctcctgacatcatgatccacccacctctgcctcccaaagtgctgggattacaggcatgagccactgtgcccggcccactttgtttcctttatgtactgtttttgactccaaaatggtttctctttttttttttttttttgacagtctcactctgtcccccaggctggagtgcagtggcatgatcttggctcactgcaacctctgcctcctgggttcaagcggttctcctgcctcagcctcctgagtagctgggattacaggtgcctgccatcgtgcccgggtaattttcgtatttttagtagagacagggtttcacaatgttggccagattggtctcgaactcctgacctcaggtgatccacctgcctcagcctcccaaagtgttgagattacaggtgtaagccacagtgccyggccttttttctttgctttgctttgcttttttttttttttttttttttttagacggagtttcactcttcttgcccaggctagagtgcagtggcatgatcttggctcactgagacctccgctcccaggttcaagcaattttcctgcctcagcctcccaagtagctgggattgcaggcatgtgccaccacgcccagctaattttgtatttttagtagagatggggtttctccatcttggtcaagctggtctcgaattcctaamctcaggtgatccacctgcctcagcttcccaaagtgctgggattacaggtgtgagccaccatgcctggctttttttgcttgtttgttttaatagagacagtctcactatattgcccaggctggacttgaactcctggctcaagcaatcctctcacctcagcctcctgaacagctaggactacaggcatgcactaccctagtttcctatttcgttgttgttgttgttgtcattgttattgttttgaggcaggggcttgctctgttgcccaggctggggtgcagtggcacaatcttggctcgctgcagcctagacctcccaggctcaagccatcttcccatctcagcttcccgagtagctgggactgcaggtgagcaccaccacgcccagctaatttttgtagttttctgtagagatggggttttgccatgttgcccaggttggtcatgaactcctggactcaaaagatccacccgcctctgccttccaaagtgctgggattacaggtgtgagccactgygcccagccacaactttcctattcttgatcacattttatctgtactataacctagaaaggtgaaacacagtgtattatccccatttatagctagggatccaaacttgtttgctgtcttccaaatgtgggttgcatttttctgtttctttgttgttactcatgctgtttccttcacctagaatgccctcactcaaaaactcacttgtcgaaatcctaatcctctttgagggctaatctaagattcttctcattccttgaagttttctttattttcctaaccagttgcatctctccctgttttgaacccgagagcattttgcacttcttattcgattcatttggcagtcatttgtatactcctctatcctctctattggattgggaccctttttaaggttgtaccaggaaaaaaaaacccacractacaacagtaataactatataactaactataactaacgtctcttaaaccctttatgcagactctgtgctaagtactttgtcattcaacatgcatcaactttgtgtgaagtgcctacaatggcagacactgatttaagggctggacatcttacattatttcacttatgcctcacaaaaaactaaatggggtagatgttatttttagccccaatttacagataaggaaacaggcacagagccagcagattatataaattgcccaatgccacaaatttaataggtggtgaagctggaatttgaacgccaccattctaatttagaacccatgcttgtcactactgcatgtcaaataattttctctcattcccatccccaggtcctagcagagtatcttatgtatggaaggtcctgataattataggataaatgggattgaatatagaagatgaaatccagagagatggactttcctaaagtcatagggcttgttgggatgaaaaatctagaatttaacrgttcccagctcaggctattttatctaggctgccttgcttatttaagtcatttngagaaaggggaactaaagtagctataagcctctgttcatgtgagggttgtggtgcctgtggtgaagaagttaaagatattgtcagaaaattctcgtagcataggaagttgtgactgagatggctcgaagtgaaacagaaagcaagttgtgtaatctcagtatttgtcaggattttgcttttcctgacttgctttgcacagaatrttccctggatgaaagcccagaaatcaccaacatttcagacaatgctttctgagccttactctgttccacatttcataacaggacccctaccatggaggagaccatcaaagatccccccacatcagctgtcttgctggatcactgtcatttctctcaggtcatctttaacagtgtggagaagttctacatccctggaggggacgtcacatgtcattataccttcacccagcatttcatccctcgtcgaaaggattggattggcatctttagagtaagtggttaattcagtaccaagtgatcaggaactagaggtgattcttagttacctaactgtgtgactctctgtgtattataagcattttgtataatatgtgttggcagtttttaaattctagccaagctccacagcacttctctcttcacacattaatgtgtgctgtgggactcaaattttcatttcagtgtcaagctaaaataagatggcaaatcatataatcctcaaattttgttatgcttttttttttgcttttttcttttcttttttttttttgaaatagagtcttgctctgtcacctaggctggagtgcaatggcacgatttgtctcactgctacctccacctcccgggttcaagcagttctcctgcctcagcatcccgagtagctgagattacaggtagctgccaccacatctggctaatttttgtatttttagtaaagacgaggtttcaccatgttggccaggctggtctcaaactcctgatctcaggtgatctgcctgcctcagcctcccaaagtgctggaattacaggcgtgacccaccacgcctgtccttattatgctgtcaaaaaccaaatataaatacttgcttcttgttgttgagatagagtcttgctctgtctctcagagtggagtgtagttcactgcagcctcaacctcctcccaggctcagtgatcctcccacctcagccttttcagtagctgggactacaggtatgcagaacaatgcctaacaatgcctaactgatttctttctttttttttttttctttgagacggagtctcattgcccaggctgaagtacagtggtgcaatctcggctcactgcaacccccacctcccaggttcaagcgattctcctgcctcagcctccagagtagctgggattataggcgaatgccaccacaccctgctaatttttgtatttttagaagaaaccaggtttcaccatgttggtcaggctggtcttgaattcctgaccttgtgatctgcccgcctcagcctcccaaattaaatgctttttacatgatcctattttgaaatatttatgtatgacttgactgagatggctgacctcatatgtcatttctgagactaaacattacttccttacttggtatgatgtttagtttgttttgatacaaatacctcaaatctggaaaggatattgaggatattgacatcctgtatccaaaaagtttattcctgaataagtgcgtctgactactttataatgatttccaaggacygaaagtttatgagctctcttagtgacctcttccagtgtctgatcaccccgtcagttcaagtacagaatggtatttttaaattttaattagcttactctctatgtcccctttgccctcccatccgtgtctttccctcttatacatctcacatacaccataatgacaaatcttcttatttccagagacaagaaataaaggtcaaatttaattaatttacactgccaactcccaacgtcagtgacctttggtttgacacctcagtatgtcatgtgcctatttgccagtgctattcatcctgaaatcagacaccattctcaactgcactgtgaaggagctgttgcttatttatatccttcattgaattccttttccataattgtttggaacatcaagcttattgatgagcaacggaagctggaggtaacaagactggtgtttggagatagggattgtggccaaccagcaggacactggcaagtatcatgacagctgttgagactgcaaggtgttgaatcatcagactaaaaggcgtgccaacccaccagagtgttttctgtcttagaaagaagatggtagttgtttttcttcctcatatgtagcaaagcgtataggtcacattgcctggtaagagttttctgcaatggagctgtagcttcactgtctagtacagctgctactagccacrtgtggctgttaagcacttgaaatgtggttagtgtgactaagtaactggatttaatttaatttaatttatttatttagagacagagtttcgttctgttgcccaggctggagtgcaatggcgcaatctcggctcaccgcaacctccgcctcccaggttcaagcgattctcctgcctcagcctcccgagtagctgggattacaggcatgtgccaccacgcctggctaattttgtatttttagtagagatagggtttctccatgctggtcaggctggtctcgaactccccacctcaggtaatccgcctgcctcggcctcccaaagtgctgggattacaggtgtgagccaccgcacccggcctgagtaactggattttaaattttacttaatgttaattaaagtttaaatagcttcatgtggctagtggctatcattggttaatgcaggtacagatcatgaaaaagagaatgattcaaaaattacttaccagactttaaaacgtagtttataacgtcttttttttttctttttggaacatcgttatatttctattttgcttagactggttgtattcccccaagcgcttagcaaccaccagtaaagacttcaccatatatcatatgaaaatcttgggcgtttttctttttttaagatggagttttgctcttgtcacccaggctggagtgcaatggcgcgatcttggctcactgcaacctctgcctccctggttcaagcgattctcctgcctcagcctcccaggtagctgagattacaggcaccccgcctccccagttcaagcgatttcctgtctcagcctcccgagtagctgggatgacagggacccaccaccatgcgcagctaatttttgtatttttagtagagacagggtttcatcacgttggccaggctggtctggaacttctgacctcagatgatgcacccacctcagcctcccaaagtgctgggattacaggcgtgagctaccgcgcccggccaatctggggccttttaaaaacaagtgtttaaaaatattttgtccaggtgcggtggctcacgcctgtaatcccaggagggaggccaaggcagatggatcacttaaggtcaggagttcaagaccagcctggcgaacatggtgaaaccccatctctactaaaaatacaaaaattagccaggcgtggtggcacccacctgtagtcccagctactcaggaggctgaggcaggagaattgcttgaacccaagaggcagaggttgcagtgagccaagattatgccactgcactccagcctgggcaacagagcaagactccatctcaaaaaaaaaattttttttaaagatgtatctatatttggaatgcttcatacatttcagaggtattaccataccccaataaagaaataatcgttaatctgaagaagggcttctaatgtcccttgtccataaagctattgacttgaatacctaccctgaggacacactatgctaggcctatgttgagggtgtgtgtgtgtgtgtgtgtgtgtgtgtgtattgcctaattaaatcctcactgtgtgtgtgtgtgtgtgtgtgtgtgtgtgtgtgtgtgtgtgtgtattgcctaattaaatcctcacagtgggccaggtgctgtggctcatgcctgtaatcccagcactttaggaggccgaggcaggtggatcacctgagctagggagttcaagaccagccggaccaacatggagaaaccctgtctctactaaaaatacaaaattagccaggcgtggtggcacatgcctgtaatcccagctacttgggaggctgaggcaagagaatcccttgaacccaggaggcggaggttgcagtgagccaagatcatgccattgcactccagcctgggcaacagagcgagactccatctcaaaaaaaaaaaaaaaagaaaagaaaagaaagaaaaattctcacagtgcagtagccccctgaggtgggtagtagtatctcttgggcataagtaagtaacatgaatatccctgagagatggtgactttcccaaggcctcacagtgaataagccgtgaagcaggtttggctcccaaacctctggtttttcctcctctactctgctgaattcctttgagcaacagatagtaaattagagaatgaagagttggctgtaaagtttcgtcctttgcagctcacctcaaatgctctccccartgttctttcagtgtagtcttaatcagactattcaactcctcatcaccccagacactggtagtatctggcaccaggtaggtactcagtaactctttttattttttatttattttttaaaatttattttattttgagacagagtcttgctctgtcacccaggctggagtgcagaggtgcaatctgggctcactgcaacctctgcctcctgggttccagtgattctcgtgtctcagccactgagtaactgggattataggcatgcaccactgtgcccagtcagtaaatatttttaatacatacaaatatgttacatcttctctatagtgaaagccaccaccaatgatggagcctaaagcaggaagcagtctgctttccttccctcagtgtataatcctatgcttcatactctccttgacttaggcatttaaatgtttccaagacaaattgraacaagaactactcaaatggaggagccaaggacagaaattgcaggtggctagaagttgtttccctgttccaaggcagcaataattcttaggccttcccaatgatattttggtcacagtgcattaagaaactccaggatgtgaatgaggactccataaaattcctgcttcctgtaccaccgcaggctgcagtggctctgagatgcttacagcaatggggtgtgtattaatgagactctaaaacatgccctagratgttctgatgagtttttggtatagacttttcaaccctgctttgattccttaatatataaaaatggaatttatttttagttctcttcttactgagctcagacagggtcaaaatatggcaataaatgtaattttgcttctcatttgctgagtgttgtccccttgaagacacaatagcttcctttctattctctggtgtgcttttattttctagataagatttgagcaatcttttacccccttcacatttgtgagaatattttccacttagccagctttctgctctgaggcgtgttttgctgcatccttatgtcttatgatttattgtattcaatacctagaagaggcctttacgactaccagattgttgttaatatctttattaccaaaaagccatcattaagcatgcatgaagaaaaaaaattatatagacctggaatctcttatctggtgcctcataatctaagaaccctgttctccctctgcccccaacacagacattatgaaaaataatgggtttttttttaatgcagtagtatatccaggttggtatatgacaaggcttaattggacacaatagaggacacaccaatagagagggcaggtcagaagtgatttctgatttagaagtccaaagaatgccattgtaagaggatcagggttcatattcccgcaactttccccttaaatcagtctcagctctatctctgacttgtagatagaatttttggagcttttttcctgggtggtgaggagctagttttcaaatccttctaagacttgtattttgagctgtgtatgtgcaccccaatttttggttgtatcagacattttcccatatgtatttgtcataagtgaaaaataaaataaaaaattaaaaaaggtttgagccctggcktgagaatcttgtcataatgaactcattctattatattttcttttttctttttttggagacrgagtctcactctgtcacccaggctggagtgcagtggtgcaatctcggctcactgcaacctccgcctcctgggttcaagcaattctcctgcctcaacctcctgagtagctgggattacaggcgcacaccaccgtgccaacttattttttgtattttaatggagacgggttttcaccatgttgcccaggctggtctsaaactactgagctcaggcaatccacccaccttggcctcccaaagtgctaggattacaggcatgagccactgcacccggcctatattttcaatatatacaaataaaaagtgattttaagaagatgtagcccaattaggattttccccagtcccctttcaggtactaaataagaacttcttgtcattgcaggtggggtggaagacaacccgtgagtattacaccttcatgtgggttactttgcccattgacctaaacaacaaatcagctaaacagcaggaagtccaattcaaaggtgagaaaaatactggatcaaaggtgttgaagacagtagccaagactaattaattcccttcagcttgagctttctggggcagataaaaagatttccagaattttacttttctgaatagatcttattttggatgaaaaattatgttgtgttttcagcttactacctgcccaaggatgatgagtattaccagttctgctatgtggatgaggatggtgtggtccggggagcaagtattcctttccaattccgtccagaaaatgaggaagacatcctggttgttaccactcaggtttgtaaaacttctcacctcaatcccttactgccattacgrgtagcaatataggataggatggaatttgagttaataaggctttattgaatatctaacgggtatcattggaaaaaatgtatgtagtactcacacagactcactcaggaatgacttcggaatgttaacaagactcataacaataagtggtttcttcttttctaaaacttctttaactcagctggcattcagttattcttttaactttccaattgcttaatttttgtcatctacacatcttatcacaatggtaaatgtaaaagctcctttgaggagagaagcaccaaatattcttatctctttcagttctggcctacagcctgtctgtcatacgtgagtattagattcattttcttacttcatcatttaacaggacacctacttttcatccagcactatggtaggcactgggaacacaatgaagaatcagttaaaacactgtccttggcctcaaggagctaagtccattgggagagacaaacaatactaagcgtctgcaagaagaagctacattcttatatcattgttccttttaattttaatggatataatttttgcttgcctttcttggtattgctgcaattataaagacatacctctgttatacccttacctaggtattaaggagcagcccccatctgggatacataggtgtcactgcagtgaatgggaatcagccagtccctcaccatcctaacctatgggaattttctgctagagggacttggaatatagtttatggaatgttcttttgtaggragaggtggaagagattgagcagcacaacaaggagctttgcaaagaaaaccaggagctgaaggacagctgtatcagcctccagaagcagaactcagacatgcaggctgagctccaaaagaagcaggtatggctgctggttataggtgaccttggagcrtggagatcagaattggatggtgcctcttatccagcaccatattctgttttgcctgtgatctcaccttcttataccagtatctttgaacaggcattagttttgtttgtttgtttgaaatggagtctcactgtgtcacccaggctggagtgcaagggtgcgatcctggctcactgcaacccccatctcccaggttcaagcgattctcctgcctcagcctcccgagtagctgggattacaggtgatcaccaccacacccagccaatttttatattttttagagacagggttttaccatgttggccaggctggtctcgcactcctggcctcaggtgatccactcgcctgagcttcccaaagtgctgggattataggcatgagccaccgtccctgtctgaatatctccttttaattgttcatatgttgaaatgatattttaggtacattcggttaaatatactatcatttggccaggtgcagtggctcacacctgtaataccagcactttgggaggccaagatgggtggatcacttgaggtcaggagttcgagaccagcctggccaatatgacaaaaccccgtctctactaaaaatacaaaaattagccaggagaccgggcgtggtggctcatgcctgtaatctcagcactttgggaggccgaggcaggtggatcacaaggtcaggagtttgagaccagcctggccaagatggtgaaaccccgtctctactaaaaatacaaaaattagccaagcatggtggtaggcacctgtaatccaagctactcaggaggctgaggcaggagaattgcttgaacctgggaggcagaggttgcagtgagccaagatcacacccctgcactctagcctgggcaacagagcaagactctgtctcaaaaaaaaattagccaggcatggtggcatgcgcctgtaatcccggctactcaggaggctgaggcaagataattgcttgaacccgggaggcagagattgcagtgagccaagatcacgccactgcactccagcctgagcaacagagcaagactttatctcaaaaaaaattaaaaacaaaaaatatatatatatgcatacacatagtattattaaaattagtctgtttctttttacctttttaaaaatgtgcctcctaagattttaaaattatatgtagctctcacttattgaacagcgctgttctaggaaaagggcagttctgtctattttgtccactgttgtgtctgcaatgcaagaacagtgtctagtgtggaataggctctcagtaaatatttgtttaatgaacaaattataagctccagtggaatgagaaattaaggtgatgcatttttaatataaaaagagcattttgtgaccaggcgcagtggctcatgcctgtaatcccagcactttgggaggctgaggcacaacaattgcgtgaacccgggcgacagaggttgcagtgagccaagactgcgccactgcactccagcctgggcaatagagtgagacactgtcttaaaaaaaaaaaaaagaacattttccttttatttgagtatttcatttactgctgtgtcatgctatgcctgacatatagtaagtgctcaataaatatttgttgcctgcctaagatactcattcaaaagtcatagaactagtctgtccctttgatgttgtttcaatctataggaggagctagaaaccctacagagcatcaataagaagttggaactgaaagtgaaagaacagaaggactattgggagacagagctgcttcagtgagtgcatcccataattctgggaggggaagagctgctgtaccatcagtacccttaagtacagtcagattagatttctggaatttgtgagaaaacactgttatgacattgatgatgtgattctccaccctttgaatcatgaattagaaaattggtatcagaatagtcaggaaaaatgatctgatttcaaatattaactttagggattgaatacttgcagttttttggagtcaggaagccaaaacaggactgcaatggagactagtagatttttaaataattctgcaggcttagggccaagccagccttaaatcacttaaggccaggggtagctgacctggaatcagtgaatttttcacatagttatctccacctctacagactgaaagaacaaaaccagaagatgtcctcagaaaatgagaagatgrgaatcagagtggatcagcttcaggtaggtaatgccatatgtttgtcaaaggatattttcttagccttaccactgctccaatttggtggcctagaaagatgtatttcattgcagtgagtgcctaatggcatacttttcaaagtatcacactaaagtttcaggttatgtattttccattcttggaccaggtaagcctccaccctacccatgcccctgcttttaaaaaaaaaaaaatcatgattcacagccgggcgcagtggctcatgtctgtaatcccagcactttgggaggccaaggcaggtggatcacctgaggtcaggagttcgagatcagcctggccaatatggcaaaaccccgtctctactaaaaatacaaaaattagctgggcgtgctaatttacaggcgcacgtgtaattccagctactcgggaggctgaggcagaagaatcacttgagccccggaggcaaaggttgcagtgaatagagattgcaccactgcactccagcctgggtgacagagcaagactctgtctcaagagaaaaaaaaaaaaaaatcatgattcacaaggaacttagtgatttgttcatgtattactaaggtagtttaccatgagctcttaatatagatgacaatcatctatatcaataatcaaactttaatcttttcaagcaaaatcgtactcaaaagtctggaatatagagcagatagcagaactgctctcatttttaggaagctatgccttaaagaggtgctttaaagagtgatttgtctaattttactcagttggcagttgggagttgctagggaaacacatctctttgttattgtacgttaaaaagcattgttcctgttttgttttccttcttttatatcttggttatgttcactatttttgttttaggcccagctgtcaactcaagagaaagaaatggagaagcttgytcagggagatcaagataagacagagcagttagagcagctgaaaaaggaaaatgaccacctctttctcagtttaactgaacaggtagagtcatgagagaaaacaacacttttaggcatttgcaagaaaatatacgttgttctttgtataaagaacattttaatgttctttaatatacctggatgtcactggctttaggaaagggctcagaggaagctatctgaaatgagatagctcatggctttcttcagaaactgacgagagaagacttgcctctccctatgcatcctgcttgctcattagcttagcaggcccttccatggtgtgtgtgtgcatgtgtgtgtyttcccagcaatggtactgaaatctctttttgtgcagaggaaggaccagaagaagctcgagcagacagtggagcaaatgaagcagaatgaaactactgcaatgaagaaacaacaggaattaatggcatgtctgtctttggatggttatgtgggagggagcctatagggatgtagaagaaaaggatatgggcctattttccggttgatggacaggataaataagagagtgttcacctctagatgttttgctttctagccaaaaggacagagaatctgccatttataaaatgtttagaagtgggcatttctaatatgtgataagtaataaaggaatattgcaagttaaacttcatgacaagatgtagttaactagatccttggactagggctcacacagaataacccctaccctcttcttacagagttacaataggggcagacaaatgaatggttataaagggctctacgacaggaaaatataccacccaaagcaaatcttgttataattaatatattagcaattatcatcattatcaattatgtaggaatgaaaggctaattgactaataatttcctgtaatatattgttgaaaaagagtccccakggcgttgacaggtgcctggaagccccgtttacttagttgatccaaggacatragtaatcctgatgtctgagggatatccagtcatctgattataattcacatcatatatgcatcatccagtcaaccattgagtacctactgtatctaagatactgtatgctttagcatgatataggaaagagtagaacaaagtttgcaaatcagcagatcataggtcaaggtcagaccacagaaatgttttagaaagtagttaccaacatttaaaaataggaatatttcccataaaaatttgtatttccaacttcctttgggaaatgaarggacctagcaacattgagcccacattcctgtgcagcagcaatagctagagctgagtagctgctgtccctatagattctccatctagctgcagtctgcactgttttattgcattcarttccttcgtttgattacatttcttgcctgctctctataggcacattccagtttgtgacctctgatgtagcaaataaattactgttttaaatgatctatagtcccggctgggtgcggtggctcgcgcctgtaatcccagcactttgggaggcggaggcaggtggatcacctgaggtcaggagttcgagaccagcctgaccaaaatggagaaaccccgtctccactaaaaatacaaaaattagccgggcgtggtggcggcacctgtaatcccagctactccggaggctgagacaggataattgcttgaacctgggaggtggaggttgcaggagccgagatcacaccattgcactccagcctgggcaacagaataagactgtctcaaaaaaaaaaaaaattagcccgttacaatggtgcatgcctataatcccagctactcaggaggctgaggtaggagcattgcctgggccccagaagttgaggctgcagtgagcggtgattatgacactgaactccagcctagtgacagagtgagatcctgttgttactggaaaggagtcctgatccagaccccaatggagggttcttagatttccagcaagaaagaattcgaggtgaatccatagagtgagagcaagtttataagnnnnnnnnnnnnnnnnnnnnttttttttttctgagacagtcttgctctgtcacccaggttggagtgcgctgacctgatctcagctcactgcgacctccacctcccgggctcaagctattctcctgcctcagcctcctgagtagctgggattacaggcacccgccacgatgcccggctaatttttgtatttttagtagagacggggttttgccatgttggctaggctggtctcaaactcctgacctctggtgatccacccacctcggcctcccaaagtgctgggattacaggtgtgagccactgcacccggccaattttcttagttttcatggaatatttttcaagacctaggggctccccacctggctgatagcaatcctaattcctcatacatcctaaaaggccgctaaatatgagtactgtgtatcttatgcttcaggagcctaggaacaagaaagcggcactaactgtggaggagcagttagcacaagaggtggaacgccttaaggcaaaggtagaggccaggaaagcctatttcttagrgaagtacaaagagtgtcaatgacttcacaaacagatcagccaactcggggcggctgcactggtaggtgacagagataagggggcccaggaaagcaagaggtgcaaaggttagtggttcttagaccaagtccagaaaatggtacacccttgttaaggtgagaaagttatctttgcactaaaaagagggatgtagtgtatggccagaaactagcatgggggtccctggaaatactggccccaacttagccacaggtctcagggaaggtttttgtaactatcaagcaggtttctgtgcagactcagagagccctttcttatttctgccttttgaggaagtgaagcaggactagaagagccatcaggagccaacggggatgggaagcaaggagcctgcagtcagcattgtcactgggtagccccctctggcattactacctcagggtcggctagacatgcacagcagtttgggcaccagcattcaaataaaaaatcttggatgaaaaaccacaactagtaggcttagcttaagtgtgtttgtgaggtatgcacatgtgtatgtatgcaggtagaagatgggaagctctgaagcatgaaaccagttaggtcaacccatcacactgggttgcttatggccccagtctgagctccttgtatccttggacaaatgccttcctgtgttccctcttccttcatgtaacttgagccgagatgcctattctcacactgtaggaaggaatcacacyaacccaaacctaagtgcttcaggcttcgctgagtgagacgtttattcaaaacaaagattattgttttcatggttaggtgggattcaacaaggtttcatttatccctaattctgataagtcagtcttgagattttccccaaggttgctttttccctccttggtcacttataccctcagctaaaccaaaaaaaaaaaaaaaaaaattggcatcttgatgccagctcaggccttcaggtgtctttttaagtcactttaatttagcaccctgcccatagtaccatttcttcctcccagttgcgttctcctccatctcagtctccccgctttgcaatgccagattctctacaatttctcaccttgtacccagactgcaatatgtgatcctaatcctaattttttttattgttgacaggatgaaaactttgacctgtcaaaaagactgagtgagaacgaaattatatgtaatgctctgcagagacagaaagagagattggaaggagaaaatgatgtaagtgtgtgaaagagggtataaaaccccaaggttttaaggggaaggatcagggtggcccagagatgtagtgaaaaaaataaaaagttaagggccctttctgggacagtgggtgaaacagttgttcctaaacgaagagtaaatttaatctaatttcctaatctaccacaaaaccctgtctttattctacaactgaaatttgtttggcatggcaatagtcaccttgaaagaagccacactgatgaagacctaacttatttttgcttttaacttcacagctaatatatgttgccttgggggataggggaataacgtcctacataactttatgctagtggggaactccttttcttcagcacaactttttcctttttctctgctgccaaaccaggagcagaagtggtggtctgtaccagtgctggacccatggtaggcccctaataaatgctgtgcattcmttcattcattcattcattcattcattggttcattcattcatccaaccaacatttattattgattgaagatgatatggcaaaaaataaagtggttgtacttgaagtcaaggtcattctcatgttctttcttttcttttttttttttttctttttttgttgttgttgtttttgagacaaggtctcactctgtcacccaggcttggagtgcagtggcacaagcttggctcactgcagccttgatctcctgggctcaagtgatcgtcctgccacagcctcccaagtagctgggactataggcatatgccaccatgcccggctaattttttttttatttttagtagagacaaggtcttgctgtgttgcccaagctgctctcaaactcctgggctcaagcaatcctcctgcctcggcctcccaaagtgctgggattacagacatgacccaccacgcccggcccattctcatgttcttgctcagcatcaaataataggtgtccatgcattctggctgctactcctgtatctatacttccatcaattcttcatctttaccctttttttttttttttgagacggagtttcactcttcttgcctaggctggagtgcgatggcacgatctcagctcaccgcaacctccaccttccgggttcaagcgattcccctgcctcagcctcctgagtagctgggattacaggcaattgccaccacgcctggctagttttgtatttttagtagagacggggtttctccatgttggtcaggctggtctcgaactcctgacctgaggtgatccacccgccttggcctcccaaagtgctgggattacaggcgtgagccactgcacccggccctttttttttttttttttttttttgagacggagtctcactctgttgcccagcctggagtgcagtggcatgatcgtgactcactacaacctccacctcctgatctttaccctctataatccttctggcctatgcctcctagtgatcatttttactatttttttctttttaaaattgcggttaaaacacataaaatttggctgggcgcggtggctcacgcctgtaatcctagcactttgggaggccaaggcaggtggatcacaaggtcaggagatcgagaccatcctggctaacacagtgaaaccccgtctctactaaaaatacaaaaaaaaaattagcgagcttggtggcaggcgcctatagtcccagctactcaggaggctgaggcaggaaaatggcgtgaacccaggaggtggagcttgcagtgagccaagatcgtgccactgcactccagcctgggctgacagagcaagactacatcaatagaatagaatagaatagaatagaatagaatagaatagaatagaatagaatagaatagaatagaatagaaaatagaatagaatagaatagaatagaattttaccatcttaataatgtaaaagtgtacagttcagtagagttaagtgcatcacagtgctatgcaacagatctccagaacttttccatcttgcaacattaaaacttcatacctactaaaacattaattctccctcactttctacttttgattatatcatttatgccaatgtgtttcataattgcagaaggctttttgggttctctttctagtcttgttattcccattctctcttttttgttttgttttgcttttgttttgtttgtttgtttgttttttagagtcttgctctgttatccaggctggagtgcagtggcaccatcttggctcactgcaacctccacctcccagattcaagtgattcttgtgcttcagcctcctgagtagctaggattgcaggtgcgcaccaccacacccagctaatttttgtgtttttagtagagagggggtttcaccatgttgcccaagctggtgttgaactcctgggctcaagcaatccgcccacctcagcctcccaaagtgatgggattacaggcataagccactgtgtccggcctattcccattctcttaatttataccttgagtttgaaatccctgttttcctgagttagtttgattgtgggggggggcaggtgcacacacagtttgcaaaacaaagggaaagatttggtatttggaagctttgttaagaactgtaggccgggtgctgtggctcacgcctgtaatcccagcactttgggaggccgaggcgggtggatcacgaggtcaggagttcaagaccagcctggtgaaacctcatctctactaaaaatacaaaaaagtagccaggtgtggtggtgcatgcctgtaatcccagctactcaggaggctgaggcaggagaatcgcttgaacccgggaagtggaaggttgcagtgagctgagatcgcaccactacactccagcctgggcgacagagcaagactctgtctcaaaaaaaaaaaaaaaaaaaaaaaaaaaagaactgtagtaaagccctcttaaratgataagggaattttgcttattttctttytcctaaraacttgaaatgctgtctgtgccacttttagtaatttttttctctttttcattacctccctcccaccctgtcttcttactcattctctgtgttgatatatccatttgaatgggataagacmtgaagaaggaaaaattattttaggtgaatatttgcattgtgtaagaaattattctaggaaagaaactgaaaaaatattctgctctcaataatatacaacactgggaggccaaggcaggaaggtcacttgaagccaggagtttgaaaccagcctgggcaacaaagcaagagcctttcatctctacaaaaaatttaaaaatcagccaggcacggtgtygtgtgcctgtagtcccagctactaaggaggctgaggtgggagggttgcttgagcccatgagttcaaggctgcagtaagctatgatctcaccccgcactccagcctgggtgaccaagcaagaccctgtctctaaaaaaaacaaatttaacaacaacaataataatatacaatagtttcaacgttaatatacctatcagaatagttgcagtgttaatatagctcctgccactttcatatatctacatatttgttcctccctgtagttggcatgtatttagagatttaaaacttttttgtattaatataaacaaaatgtagtaaatatatttaaattcaggtataggctgggcacagtggctcacacctgtaatctcgacactttgggaggccaaggcgggcggatcacttgtggtcaggagttcgagaccagcccggccaacatggtgaaacccgtctctactaaaaatacagaaattagctaggcgtggtrgtgggtgcctgtaatcccagctacttgggaggctgaggcacaagaatcacttgaacctgggagacggaggttgcagtgagccgagatggtgccactgcactctggcctgggtgacagagcaagactctgactcaaaataaataaataaataaattcaggtataaagaacttagatctttggaatattgaaactgctgccttctcttctgaagaattatggattatcaattattgagtttctccagtgccacattgctaattgagaactacctgggaggggcatctcctagccagttcctggtggccattcttggtattgtctttcaacatgtctataaatcctctatccttagcttttgaagagggagaacagcagattgctcagttacatgggtctggattttaattctttgccgtatcaagtacctacttcagatgaaggaggcgcaagacaaaatccaggacttgcctatggaaacccatattctggtaagacaactttcccattccaactggaaggaccctgcctgcatccctttcccctactaaatttttgtttctgaggtgctaattaagaccagtctcattgttaagacttgctgggcagaagctgaggacccagtagaaagattgccaggcgagaagtgttaattgagaaataaatctgaatccagaagacacaaatcagatcattcgcctagaggcagcagacacaaattgagtcccgtggctatattccaaatgtgtaaatcagagaaatgtctttatgtagaagatatacacatacaaagctgaggaagctaattaaggttttgaaatggtagcaagagaggcaagttatgccgcccaggaactagcagttacagcagycaccctgatggctaaccaaggatgacagaaacgtgctccacagagactcctcgatggtaggacaggaaatgggggtgaaaaggacttggggtaacatgtccttgccaaacagggagcttttctcatttgtctccaaaagcaatatgagatctcatttactttttgggacagttaaagcagcagtattatctttagagttacaaccagatgtttataacaggcaacaagtttatttttcctttaaaataagtttgtggccgtgcgcggtggctcacacctgtaatcccagcactgtgggaggccgaggcgggcagatcacctgaggtcaggagttcgagacaagcgtggctaacgtggtgaaaccctgtctctactaaaaatacaaaaattagctgggcatagtagtggacttggctcactgcaacctccgtctcctgggctcaacygatcctctcacctcagtgcaacctccgcctcctgggctcacctgatcctctcacctcagcctaccaagtagcagagactaaggcgccagccaccacacccagmtaatttttgtattttatgtagagatggggttttgccatgttgcccaggccggtttcgaactcctgagcttaagcagtccacccacctcagcctcccaaagtgctgggatatgtgagccatcgtacctgactgtggatacagtcttaaaacctattctcagatagtcattaaattgttactgtttttattaaaatctcattttccccactctgaaaatagctttgttgtttttttctgactgtataacatatatatatatgtatatatatatatgtgtgtgtatatatatatatatwtataaagcctgtgtgtgtgtgtgtgtgtgtgtgaaatgaaaatacaattttcatttgtaattttattttgaaataatgaaaatacaatttcaggctgggtgtcgtggctcactcctgtaatcccagcactttgagaggccgaggcaggcggatcacttgaggtcaggagtttgagaccagcctggccaacatggagaaaccctgtctctactaaaactaccaaaaattagccaggcatggtggtaggcacctgtaatcccagctactcaggaggctgaggcaggagaattgcttgaacccaggagacagaggctgcagtgagctgagatcacactagtgcactccagcctaggcgacaaagcgagactctgtctcaaaaaaaaaaaaaaatacgatttcattatttatgttttcttttcaccttatcattgacctagatcccctctatcagaagtaacggtatatatatgagagagaaagaatcagaggcattgaggagaaagggaacaatgaaagttacaggaaatatctgccagaacacagttggagaagctagggatggtattttctcattgaatgagatcttttttattcttttcaggtatccaagaaagttcttccsccagcccggtaagtatttgattcatgagaatattcccacaaagcacttgaaaatttcccttcctgctccagttcatgggagaaccatagggagacaggttcattttgataactccagaagtcagctggatcagtttgttttgggcccaaggctgagccagcctgttgtggaagggagatgaaagcacagttcatccatcagcattttgcttaggatctatacctttgaattatttggtagcataagtagggaggagatctgaaccaggcagctagccaaacaagttctgtccaatgccccttcaaggctagaagctatgttggctatttcagcaatattaggccatttcaattctggggttagacgaagcctggtaagcatcttcaaatgtgcattctcttcattcattcactatttcttgagtgcmtaaccatgtgccagtcattatgctaggcactgaggatacagtggaagacaggatggccacatctgtgccacatatagcttacatttgtactgacctctttgctcttcctcccagctctccatcaagaaatgccctatctgcaaagcagatgatatttgtgatcacaccttggagcaacagcagatgcagcccctttgyttcaattgtccaatttgtgacaagatcttcccagctacagagaagcagatctttgaagaccacgtgttctgccactctctctgagtatcccaacctcttggatgtatacagagattttatagaatagaacctrtagcttctaccatgagttatatgagtcaagatcctgcctaacctgaaattattagggatttactcagccctgctgccgctaacagtggagttatgtcactgatctgaaggtcactgttaagggcttctgctgccatccttgtgggttgctacctttaagtcgcataactctagctgtatcatcctctcacctgtcattcttctgagggtctcagtacaagggccctgggatggagccaacctgggtattcacaacaggcctgacttgatactaagtgattagttttccaagttgtcccactgccattcaaagtcagcccttgagtgtatttgttctcagtcctaaccctggggccagagattggtccgaggttgagaattccttcctcctcatccttggtgttgctttctccaaatgattgttttagactagccaaaaatgccgtggcaaagagctcagaaatccaatttggataccaaaggtttctcatgttaatttctcagcccccaaagaagcatcttactcctgaaccttagacaggaagtattgtttcagtcacagaaagcttttctgggtacctctggttagcactttctactctctgatatttcctatgtacatagcttttattgttgtaaatcctttcttaatggttaaataggattgttagcaactatgggtttgcagttttctgagtaggtgagttttgaatatgggtaaatcagaataatgagacaacttgttaatctctttaatactaaaaataaattactcttctatttcagggacttaggtaatttaaaataaaccttcaatttatggtcttctrttttgaagctcatgggaaaattgtgatcaaaagggctatgggaagggcagaccccgccaatgatttctcttcacctgtcttaagattaaataaaaaagagtgtcctggcagttatcttgaggtggggaaggaggtgatgaaacattagtttgtgaaatccaaggccctggcttkctttctttcttttttttttttttttttttgaaacagtctctctctgtcacccaggctggcgtgcaatggcgcagttgactcactacagcctctgcctcccaggttcaagcgattctcatgccttagcctcccaagtagctgggattacaggtgtgtgccrcaatgcccagctaatttttgtgtttttagtagagacagggtttcactatgttggccaggctggtctcgaactcctggcctcacgtgatctgtccacttcagccstccaaagtgctgggattacaagcgtgagccactgtgctgggcccgaggccctgacttcttgctgtaactttccatgcattttttttaaaaggagcagtgtggattttcgcaccctttgtgaactaagttcaatgygctctatccaaatttgcctaattgaactataagaaagtaataattccattttctatcccctcagggactgaacaaatggaaataactcccaggcagtatcaggtggtcactacagagacttccacaaaaacttttgaatgatgtgaaacacgatgtcatgaataagggttgagccaactatagctctgtgttcctactgggctttccctaatgtggttgggagttatgccctagactaactgtattgtcctagtcacagctccttgctttgatttcatccttgataaaatgaagatgaaacttacactacttctccaagccttttgctgtcttaagaataagacctgagattaacactaaccctagaatagaaatgtaatagggagatggtaataaaggagtttttctggcacataccctccctacagaatttctgttgctccccagatccagtgaagaattgcagtttcatttattttgtaccagtcagctcttaattaagtacatgaatggagaggaacagtggtgcacataatccaaatcagtgaataccattttctggtgaattacccacccctttgcccctgctaccccgagggttaccatgattgtcaacagcagcaggagcccttccacagggcttggtaaaaaaaccagttgaggtgttaatgaccctttttgctgggtgtaaaacaaagcatctttaaccactgttcattatccccagctgctcttaccaaggctttgaagggggaaattatgctctaggcagccactagtagtaaacaatagttcttttttttgagacagagtttcactctgtcacccaggctagagtgcagtaggcgctcactgcaagctccgcctcccgagttcacaccattgtcctgcctcagcctcccgagtagctgggactacaggcgcccgccaccgctcccggctaattttttgtacttttagtagagacggggtttcaccgcgttagccaggatggtctcgatctcctgacctcatgatccaccggcctcggcctcccaaagtgctgggattacaggcatgagccactgcgcccagccaacaatagttcttatataacccactgcccaccctggccttcctccatccccctcgcacccacacattatatagctgtaaaatacctgcaaaaaataggaagttatgagagcaaatagttatctgagttgaatttttgaatctttgtacttgttatggcaacaggttttccttcctaatttcttttctcttggtctaatattaaaatgtttttgcattaccttagcatgcttactggatgggcagtgaagggagaataaagtcaccctggcacatgtgagtgtgaaagaaagctaacttaaaaaaaggaggccgggcacggtggctcatgcctgtaatcccagcactttgtgaggccgaggcgggtggatcacgaggtcaggagttcaagaccagcctggccaacatggtgaaaccccatctctactaaaactacaaaaaattagccaggtgtggcggcaggcacctgtaatcccagctactcgggaggctgaggcagagaatttgaacccgggaggcggaggttgcagtgagctaagatcgcaccactttactccagcctgagcgacagagcaagactctgtctcaaaaaaaaaaaaaaaagagagagagagttggcaagatatttggtaaacctaggccttaacacctatagcttcagctcttttccctggtcttgctaaaaattgggatgaaatgtgactgccttgatgttcaaatatcattctcctgtgatttgattttctacggtggcagtggcttacactgaggtaagcatactctaacctggtctcctaggaacaaatgtggatgaaatgtggatgcagtccattacctgggaaaaaagcaaaatggactctacatagagacaagatccaaagagatattcatctgattgccctgagttaaccaacaataggccataagctcagtgaagttacactggccccagtgctttccttagctgctctcatataaatattcaaaagtcttagtcggtgctcacgcctgtaatcccagcactttgggaggccgaggtgggcagatcacgaggtcaggagatcgagaccatcctggctaacatggtgaaaccccatctctactaaaaatgcaaaaaattagcggggcttggtggcaggcacctgtagtcccagctactcgggaggctgaggcaggagaatggcgtgaacccgggaggtggagcttgcagtgagccaagatcgcaccactgcactccagcctgggagacaaggtgagactctgtctcaaaaaaaaaaaaaaaaaaaaaaaaaaaagtcttggccgagtgcagtggctcatgcccataatcccagcactttgggaggctgaggcaggtgtatcacgagatcaggagttcgagaccagcctggccaacgtggtgaaaccccatctctactaaaaattcaaaaactagccaggcatggtggcgggctcctgtaatcccagctactcgggaggctgaggcaggagaatcgcttgaacccaggaagtggaggttacagtgagccgagatcgcaccactgcactccagcctgggtgaaagagcaagactccatctcaaaaaaaaaaaaaaaaaaagtttttagggccagtcatggtggctcacatctgtaatcccatcactttaggaggccgaggtgggcagatcacctgaggtcaggagttcaagaccagcctggccaacatgttgaaaccccatctctactaaaaatatgaaaaattagccaggagtgctggctcacgcctgtaatcccaactcttcgggaggccgaggcgggtggatcataaggtcaggagtttcggtccagcctggccaatatggtgaaaccccgtctctactaaaaaaaaaaaaatacaaaaattagccaggcgtggtggtgggtgcctgtagtctgggctactcaggaggctgaggcaggagaatcacttgaacccaggaggcagaggttgcagtgagccgagatcgtgccactgcaatccagcctgggcgacagagcgagactgtctcaaaaaaaaaaaaatagctgggtgtagtggggcatgcttgtaatcccaggtacttgggaggctgaggttgagggtgcagtgagctgagatcgtgccacagtactccagcctggatgataaagtgagactccatctcaaaaaaaaagtctttaggccagtgtgatggctcacacctataataccccgtgctggtattgtttgaggccaggagttggagaccagcctggtcaacatagcaagacctcgtctctccaaaataaataaataaataaataaataagctaggtatggtggcatgcacctgtagcctcagctacaggggaggctgaggcaagaggatcccttgagcccaggaggttgaggctgcagtgagccatgattgcaccattgcactccagcttgggccagagagttgagaccctatctctaaaaaaaattaaagtaataaaatatcattacattcttgtaccgctttatagtttagaatgtatttcacatattccctgtgtgcctctcataatcctccaagacaaggcagctattaactcatttttatggatgaataagctgaaacatgcagaaataacttgctaaaggtggaaacaatccaaatgtctatcagctgatgaatggataaataaaatatggtgtatccatacaatgggatattatttgtcaataaacaggaagtagtcatatatgttgcaatatggatgagccttgaaattatgccaggtgaaaaaagccagtcaaaaagaccacattattgtatgattccatttatttgaaatgtccagaataggcaaatttgtagtaacaaaatagattggtttcctagggctaggggttggggggaaatggagagtgactgccaataggtatggagtttcttttgggaggataaagaaaatgttctaaacttcattgtggagatggttacacgaccaaatatactaaaaaccatcaagttacatactgttttttttgaaacaaagtctcactctgttacccagactagagtgtggtgcgatctgggctcactgcaacctccacctcccgggttcaagtgattcttctgcctcagcctcccgagtagctgggattataggcgtgtgccaccacaaccagctagtttttgtattatagtagagacgggtttcaccatgttggccaggctggtcttgaactcctgacctcaagtgatcccccctgcctcagcctcccaaagtgctgggattacagtcctgagccaccgcacccggccgagttacatactttaaatggatgcatcttatgcattgtgaattcgatctcaaattatcatttgggacatgaaggatgtctcaaatacaaacacagagcaagttaaacactgttgaacttggatagattacggtgatgtcagtacaatcactgccacaactgtgctgtgttctccccctatcttggactggaggcagcagcttcagtgcgatagaatcaagattaatagggtcaagggaattagtgatagcccaccatttggccaacagcattagtggtctctggtaatatctattctgtggagatggatgtacccaataaagttgggggacagagtcactggcccacaaatcccaggtaatcacattaagagatccagcctgctctgcctaatgttattactttctccctgtggaaaggagaaatatgacactccaggggactacattcattgtttactcagtcaatcaacatttattgagcacccacagtgtgcagagctagtatcagaccaggatttgaaaagtaaaaagttcttcccctgagggatctgcaagattaatgaagtctctgccctcagggagctgggaaactgctgggggaaaaagtcttcggtttcagggctctcccagtcagatggggaaaggagaaaaccacccagaaaagcaatgtaaagatactcacagcactacactctgaccaactgagctaaccggcagccctaaggactcttaaaagataagggaagtcatcctgcaaattaaggacttggcagctgtgggacctcagtgttaattaaaggtgttttgaaagcccaagttaaggatgttagagaagtgtgctttggaagaggcagagagacagagatggcagacagacacggggaatgtattctgaggttctctgcaaaggcagaaggagaagcagtaccagaatgcaaaggactggtaagcaaaaatactagaacataaaaagaaatcagtttctgtcctgaaagacaccacaacctagttgagccacattaacaagcttatttgcgctaacaaggggtagggtaagggtggggaaggattgtgttatgaggatataggagtggctcagaatcccaggttgcaagtctcccagcactgtactcggccatagttcttaaaccgcatgtgaatctataattatctcaaagagcatgttgagatgagggaattgcaaccatgtgtgaggtgagggtatagtgttctagtgtgtcatagtgagagacaaggctccatcccgaggctgtaggggacagtccattctttcagtggttgttggtgtcccttgacttgtggcatcactccaaaacctgcttccatggccacagtgcctccttcctatgccgccgcctctcctcagtgtgtgtgctctgtgtgccctcttataaggacatatgtcattggatttagggcccagttggctaatccaggataagtcttttcttcaagatccttaatcaccttttgtcatataaggcattacttgttcagtatgtaaagggtatgagaagcctgtgcaatgtggcaagactcctatctacaaaaaaagaaaaagccaggcttggtggcatgtgtggacatctctttttgggtgggagggcaccattcaacccactacagaaaggtaggggcagataaatgattactaggattctgacccagccaatcaagatagaacacacagaagaaacagcagccttcagggcttgaacttcagggagggaagttcaagttttaactgaatttgagggtcttgtgaggatactcagtaggcaatgggataaatgtttcagcaaagagctgggttggagctgcaggttattcctgacatgagtggcatagctgaaaccaagggagtggacgagcaaatctggagagaaaagatagggcaggctgaggacagaccct

SEQ ID NO: 8780 - DNA, 42507 bp, Homo sapiens
ctggggtggttactcacgcctgagccatcagcttcctctataaaatggggacaatccctggggctgttgtaatagagggtgagatgaaatgcattgcttggaacttgcttttgaacttaaaaatgtacgaacagacatcattccaaggtgatacatacagagttagcacacacgctctgtgactgtgtacactgtttcctgtggacctttattcacttgtttaaagggtgctctacagacattttggcttatttttcttctcgaacaaggaatgctctaataagcctcctcctgcatgaatggtttaagcagtagtttcgttactccctgggtttaggataaattccccaaaacaggatcactggatgaaagggtagctgtggttaaattgtgaatagggcttgccattttattcatagcgattcccatgtgccccaggactgtggggggatcccagttccccacaccctggccgactctagatgttatccgttggtctagaccttggccaacatcataagtgaaaactgacatctcattgttttgaaattgtgtttcctgagtatgactaaggttaaacatcttttcacctgttagttggcttttaaaatttcctcctctgtgaagtttcagatctaatcctttgcccggttttcagttgtgttgtttttattttattttattttcccaagtcctattctgccctaatgtttgtttgtttgtttatttatttattttgagacggagtctcactctgttgcccaggctggaatgcagtggcatgatctcggctcactgtaagcgccgcctcctgggttcacgccattctcctgtctcagcctccgaagtagctgggagtaacaggctaccaccaccacgcccggctaattttttgtattattattattttttttttagtagagacggggtttcaccatgttagccaggatggtgttgatcacctgacctcgtgatcctcccgcctcagcctcccaaagtgctgggattacaggcgtgagccactgcgcctggcctgtttttatgtcttttacaaacaccttgtaggacctttttaggacattattgatattaatctgttgttgtttatatgtgttgcaaatattattgtccagtgtaatatttggcttttgccatacagaagtttgtatatatttaagttttccttttgttatggaaatttgaaaacacactaaaaaataacagtaataatgaaccctcaatatacccatctctgagagtcaacagttagcaacatatagctaattttcccctgttatggagggttctttttgactttgcttgtggtggttgtgcaatgcagagatttttacctttatgtagtcaactgtagcggtcttttcatttgtggagtatggatttcatatacctaaaaaggtcttcccactccacgattattagcaaaacaaaacagaaagtactctttcaatacttctaaaatatgatttattattattattattattattattattttgagacagagtttcgctcttgttgcccaggctgtagtgcagtggcgcgatctcggctcaccgcagcctctgcctcctgggttctagtgattctcctgcctcagccacctgagtagctgggattacaggcatgcgccaccatgcccgggtatttttgtatttttagtagagatggggtttctccatgttggtcaggctggtctcgaactcccgacctgaggtgatccacctgcctcggcctcccaaagtgctgggattacagacgtgagccaccgcgtccagctatgatttattgtttttagaatggtagcatagtacttttttcatatagaagcccataatttatttaaccaatcctccattactgaacatctaattgtttctgattttcccctattttaaatcatgctgtattgagcattcctgacttctccaccccttctggattaggtcaaagcaaacctgagacatcaaatcatttcatccacaaatataagtttataatttttatttattttttttttgagaaagagttctgctcttgtcgcccaggctagagtgcaatggtgcgatctcagctcactgtaatctctgtctcctaggatcaagtgattctcctgcctcagcctcctgagtggctgggataaccggtgcctgccaccatgcccggctaatttttgtatttttagtagagacagattttcaccgtgttggccgggactcctgacctcaggtgatccacctgactcagcctcccaaagtgctgggattgtaggcatgagccactgcgcccagccaagttaaaaaaagtttttaaaatagagatggggtcttgctatgttgccttggcctcaatcgatgcccctgcctcggcctcccaaagtgctgggattacagatgtgagccacctcacctggcattcaaatttttatattatagccaggcgcagtggctcacgcctgtaatcccaacattttgggaggccaaggcaagtggatcacctgaggttgggagtttgagaccagcctgaccaacatggagaaaccctgtctctactaaaaatacaaaattaggtgggtgtggtagcacacgcctgtaattccagctactcggaaggctgagggaggagaatcgcttgaacccaggaggcggaggttgcagtgagccaagattgcgccattgcactccagcctgggcaacaagagcaaaattccatctcaaaaaaaaaattatattataaagcctgttaatcttctggtctttcgtcttcacttttaattttatttatattttgattagacacggtattcacatggttcaagattcaagagaacaaaaggatatgctgaaaaatgcgtttcccaccctgttctccagctccagtttccttcctgggaaacaactcgtgttatcagcgcgtgcacatataaaagcaaattgtgtgtctctgtgctttttccatttaagtacaattgataaacgacttgaacacggctctgcgtctaggttttattactaaacaacctgtcctggggagcgttctgtaaggagaatcctagttatttttgatagccatatgcattccattgcagggcatacaataatcattcatttatcccatctctattggtggacatttaggttgtctccagctattagattggtgcaaaagtcattgtggttttggctcaatgttgcagcgatgcagtggaaagccttgtgtattcctttcacttacgtgtgagcattatctgtaggataaatttctggaagtgccaagtcaaacaggacatgtgtttatatgtttgataaatactgcccaaatattctcttttgaggtcgagtcagtctacacaccaaccagcaatgcagggggttgcctgttttcctcccacccttgcgaatagtgtgttaccaaacttttttttttttttttgagacagggactcactctatcgctctggctggagtgcagtgacacgatcatggctcactgcagccttgacttttcaggctcaagcaatcctcccacctcattcttccaagtagctgggactacaggcacgtgccaccacgcctggctaattttttttttttggtagagacagggttttgccacgtggcccaggctggtctcgaacacctggttttaagtgattctcctgcctcagcctcccaaagtgctggaattacagacatgagccactgtgcctgacctaccaaactgctttttatctttgctgatctggtaagtgaagaatagtatcttttgtagttataattttcattttcttaataagtgagttattgaacatctttttacatgtttatgagcccatgaattttctttctgcaggagcaagcactgtctcttcatcttttttttcacagggggtggacagagtctctctctgttacccaggctggagtgtagtggcgcaatctcggctcactgcaacctccacctcccgggttcaagcgattctcctgcctcaacctccccagtagctgggattacaggcacccaccaccatgcccacccaatttttgtatttttagtagagacagggtttcactgcattggccaggctggtctcgaactcctgacctcgtaatctgcctgccttggcctcccaaagtgctgggattacaagcatgagccaccacgcccagcccacttaggctatttctgattttccagtattataagtaatactgcagtgaaaagccttgcatataaatattctatttccttaggctaaatttatttatttttttgagacagtcttgctctgtagtcgaggctggagtgcagtcatgtgatctcagctcactgaagcctctgcctcccaggttcaagcgattctcgtgcctcagcctcccaagtaggtgggaccacaggcatgcgccaccacacctggctgatttttgtgttttagtacagacacagtttcaccaggttgcccaggctggccttgaattcccgacctcaagtgatccacctgccttacaggcatgagccaccacgcccagcctcttcaggctaaatttctgaaagtgatcttcattcctaaccccaaactgccctccagaaagctgggttgcacttctgccacagcaggatctttactcctcttaaaatctccgcggagcctgggtgggagaggcagagctccggggggaagattctctcctggcctgatgtagtgttttccttggcttgtcagacatggaggagattatgccagatatgatagtggagagagtcagacatgcatgagactggagagagaaaaaaaacaaaatagcctctgaggtctcactcacagcctacttactcttactttacacacaattctatattccgatatgtttgtgacctggtttttaagagtacagagcaaattaggaaggagaagcaaggctgctacctagaggtaccctggtcctccatgaagtttccaaaagaagagcaagtgcaagtaaaataataaaacacagccagtcacaaagccatcaatttggaccatgcagtgcaaggctttaactgtcccaaggattccaatcatggataaggaagagcttaaatttgattataaatctgaaagtctggaagtcagcttgaatattgtggtagacataatcatatcctcctcctcaaaagatgccctggttctaatgcccagaatctgtgaatatgttatgctaccccacgaagggaaattacagttgcaggtggaattcaagttgccaatccattgatttaaaatagaaagattaccctggattatctgggtaggcccgatgtaatcacaaagatgctcaccagtggaagcaagaggcagaacagttggtgtcagagtgacagattgtgagagactggtgggccactgctggctttgaagatggatggggccaccagccaaggaatgtgggcagcttctagaagccagaaaagccaaagaaacaggttcccttccagcctcaagaaagctgtatccctcaacccccttgcttttagtccagcgagacccattttggacttctgattttacaaaacttgtaagatagtaaattagtgttgttttatgtttgtgttacggcagccacagggaaccaatacaaatattatctggtaccgcccattaaagctgctcagagacagggagccccaccctggcggggctccggtggctgcacaacctctgcaagcaggatcaagatgagaggcgcaggccaggtgtggtggctcactcctgtaatctcagcactttgggaggccaaggcgggcggatcacttgaggtcaggagttcgagacgagccttacatggtgaaaccctgtctctactaaaactccaaaaattaaccaggcgtggtggcgtgcacctgtagtcccagctactcgggaggctgaggcaggagaatcgcttgaacccaggaggaggaagttgcagtgagcggagaaagtgccactgcactccagcgtgagcgacagagcgagactctgtctcaaaaacaaataaaggaaaaagaaaaaaatgagaagcgcgtgttcccgactccggtgctttttcgcaaggtcgtgctactgcgccttctgaactacgagtcccaggtaccaagaaagttgaattgcgtgctgtggcgggtccgttatctgcaccacccgtctgcacgggatgcgctggcttcctgccccggatgcacaaggctccctgcgggacactcagggcgaggctctgagcccctcccccgcggcagatgccrtccagatgtggccggcgggtcccgcgggctgcggcgacagggaccccgtcgggggcagcaggagccctggtgcatcccaggccccggggggaaggccgggccgtcggaggagcggaggagccctggggggctcccgggaagccgcgggcggacgggggaggagcccgggcggagctgcgggcgggcggcccgctaggggtgaatcgggtggagtagtggtcgggtccggttacttccctttaaaaagacgggaaaggaggagtccagtgctggaggggcagggacggcggcggcgcagctcggaacccgccagggtccagggtccaggttccagcgcccggcggcccaggcaagtggggcgggagggcgggggctgcgggcgcgggtaggggtcgtggggcagttgggtgcgcgggaaccgagggagctgcagacccagcgcttggcgcgtgcggagctggacttctgcggccgcgacgcccctcttcccagatgggtaaactgagggccagggaaagcgaagaattcttttggccgagctcccactacgatctcgcggtcaagtgggtccccagcgggcctcgcaggggtcggaggggctcccatctggggagggggccccagggtgggcgagggcgacsggagcctggggaggacggacggggagggcggcggagcggagctaagctgcggcgggtggacccggctcggccgcggccactctgtccctggtgggtggggcgcggccgaaggcaaagggcgaacccggcccgcctgtggggtctctggccaacactgggctcagaggccctttctttaaccttagatctcgctcctcggtctaaagcctccgccgcagctctcagtgaagaggaaggggaactctaggtgctcaacgcccgcgttacagtcgcgttctccctcgctcctacaacccggccaagatgccggggcatggatggggaccgaggtttgggggttgtggagcctattccacgccctccctggtgagcaactgagacagatccagggccccattgcaatccactcttggtctgggaaaaggtcccctaaacagggccaatgggatcctttccccaaatgactccagaacgcaccccccccccccagcagtgcggtgggcagggacggcccaggtgggctatgtcctggggttttgtgactggatccccaytcctcccccacctcagcccctggactgcaacccaccaggccgtgttcgggggtggtcagagccctggtctcagccagacctgaggtctgatgtggcttcatccctgagtctctaaacgccctrgccttactgggcctcagttaattcacctgtgaaaggggaggcttggaccagagggcccctcagggtatgtgttttgtggaggggaggtgggcgtrtggggtaggggtgaccaggaggaagtggggacagcctctgtcccacaggaaggctggctagccccagtgggtatgggggagctgggcagggaagagggtggactcccctctccctgtgggagggtgtgctgggcccatgaggccctcatccactctcagccaccttcctgtggagccctagcctcgaaggccacactatgagtgcaaggaggccacccacagcgctgctcccgcttcacaggtggggaaaccggcccagtgtcttgaggcagcccagccgcctgccctgtgcttcccccagagccttctggggaatgagaccttcgttacacgctggcgctccttacacccctacagcctttaagctaaggcctccagccccatcgctgtaagaattgtatgctaggcattctgaggacatagatgggggtccccatgtcggaaggagccaaggtgttggaactgggtccagttcctgggctggctctggtgggagatctggaaccctatgctggggctcctggacagccctggaggcatggcatggacagtgtgtcagccgcacaccgaggccctggggtgtccttattcacataggctggcagccatctatccctagcccgggcttcaccccgggtgcctgtcactcctggccctacagtggtcccagtcacaccttggaggcaagatgtgggtcctccacaggcctgtgtctggaagcagcccccagcactccctggctaacaagttctacttctgagaactacccccagctcccagccctggtctggccaaatgggtgcgtgtcttctcctgtggtcttcaactccccttggcacggccacagtagatgtgaggggctgtatgggaggacatttttaggaggcatatgtagttaagctgtggaacctgctgctaactagctgtgtggccttgggcaaatcacttaacctttctgtgcctcagtgtcctcatttgccaaatgggggtgattatcctggtagggcacatagtaggtgctcagtttcacctaccatgtgtctcaccaggataatcaccccccatttggcagacaggagttgccaggcaggatctgtggccccacacaaaccctatgtgtacttcccccacccacaaatgcctctgctccttcctcctgtgtgccctgcattgggctgaagaggctgatgagaggcaacttcccattggggccttctgaggttcttgcaggaggggcaatgtccaaggctcccagaggaagcaccctggggtgatgcagctatgggcggaggcctcagaagcctgggagaaagccaggggcctgcggggacagagtgtgccctggcccaggcccagcctcgtccctacccttctcgctcactgctccctcagagcagacaatgagccccaggttgtccctgagctcccagtctcatagttcacagtcaggracactgagtgggagtgggtggggcctacccaaggacccagtggtcggggatggagcatggataacacagcagctcacccggccacgggtgctcagctctcccggccacagcccctcccaggctcctggagtcttcatattagagtagaaagcctcttgcacttcacatctgagaccaaggagcctctccccacccacaagtgtgggtgtcttccacactgtgactgtgacttagttatgccctggcatgatcgttgtcaaccttcatgttttttggttttggctttggttttagtttagaagaacttacgttttctggactaaaacataggcagggaagaaatacataaacccatagaaaggctgctttagttgaagtgggttgagagctcggcttctaccccgtcaagaaattcacagcgaaaggaacacatgcattttgctcactggcagaaagagcctgcaccaaagacaacccgcagggccagcaaccccaacatcatacagggtggagcagcagttcccaaagcgggtgcaactggacaggatccttttaggagctacctagaggaacaattttttctttttttctttttttttttttttttacttgagatggagtctcactctgtcgcccaggctggagtgcagtggcacgatttcggcccactgcaacctccgcctcccgggttcatgccattctcctgcctcagcctcccgagtagttgggattacaggcgcccaccaccacgcccggctaattttttgtatttttagtagagatgaggtttcaccgtgttagccaggatggtctcgatctgctgacctcgtgatccgtccgcctcagcctcccgaagtgcagggattacaagcatkagccaacacgcccggcccaggaacaatttttaaaccaatagtcatgaattgttaatataaattaacacatccaaccatgattttatcgctcagaaggaggctaagaaagtgaattgatttaaagaaaaatacraagtaaataatcacaaaggtggatcacgaaggtggtttgtgcacagcccagaagcccaggaaggaatgtcgggtagagagggtggaacctgtcccgaggatcaaggctctgaagttccatccttaactgctgtctctcattcttgcactgatgccccattccacaagcacgtgttgccctcccactgcacgccaggtgtagaggatacggcacacctggtgctaccctcatggaggcacttggagggctgcctgggggcagcaccactgacttgtgtctccagggcaagtggggagtggatgaagcaaaggcaggaagctttccaggcccaaggatcagcttgtgtgtagggaggaagggagaatgaagcggggaaaagcaggttggatttgaactgaaagaggccactggggtggagcacagaagtgacaggggagagcgtttgagatgaggccagagaatcactgggggctggatcacacaggccctgtaggtcacggcaaggactgtgggtgttgtcattcatttggccaacatgtattgggctcctgccttgtgctgggcatggaggggcatacgatgccaccaggccttcctttgaggtgcttgggtgcagcagcaggcttytgaacacactggtagcatttttctttttcttttttttttttcttttttgaaacagagtctcgttctgttgtcgtccagactggagtgtagtggcacgatctccgcccactgcaacctccacctcttgggttcgagcgattcttccgcctcagccccccaagtagctgggactacaggcgtgcgccaccacgtccagctaattttgtatttttatttatttatttatttatttatttattttttgagacagagtcttacaccgtcccccaggctggagtacagtggcacaatctcggctcactgcaacctctgcctcccgagttcaagcgattctcctgcctcagcctcctgagtagctgggattacgggcacctgctaccatgcccagctaattttttgtatttttattagagacgaggtttcaccatgttggccaggctggtctccaactcctgacctcgtgatctgcccacctcagcctcctaaagtgctgggattacaggcatgagccaccgcgctcagcctcagtggcattttcctaagtgctgtgatagaggtgggaactggagactggggaagcgcagaggggagtgggggctggtgtgcatgataaggcagtgacattgagttgggttttgaaggatgagtaggagtttgacaagagggagaggaaaggcattcctggcagtgggaacagaatgagcaaagtcacagaggtatgaaaaagccccgatgatctggggagacgctggcagctggagccacagtgggcagtagaaagaggacaggccagagggtcaagttcacagaaggtattaaggcccaagccagagttaaggtttcactctgcaggttgggcaccaggtttgaatgggagagtcccacccacactcttaggcagagccctctgctgacgtgtgctggtggggttgggtgacaggggagggtagcatagccgccactgcccgatggggtgtggaggtggccaggcctgggctgtggcaggggactggacgagggaagcccttttgtgtgttcctgaaggtgggggctgcagagcatggctgtctctgtgcccccagcctgggttggcctggtgcctagagcagggacctctcattatagagccaactttgggctacctgctgcaccaacttggaagaccagaggccttgtccagaagagtaaagattccagccagctgggcctatggtctgaatccaaagcaaacaggaagagagtatggtgggccaggcagggcctctttctttgtttagaaaagggattagtccaggccgacttgtgggtctttctgctgcaaaggtgggagggggctgcaggctccgtcagggacatatcaaaaggcttttcaggggcaggcatggtgccccagtgccagcctggggggtgctgtaaagatgggctcccttggcgaattccatccaccctgatgggaggagcctggcagcatgtgctgggagccactgctccttctctcaccacgcccaagctggagcccttcctgacacctgatttcgcacgattgccccttggggtcatcacccaagcctaatggggtgtctgctagtcactgcagtgggaggtccatcctggtcccagaccaaggccccttggggaaatgccaaaggctcagaacaccctcagtctcaaaggtgggcacccaggactcccctaaagaccctgggctcagactcggcctccatacaccagacgagaggcggcaggtatttgtgttttgcttatgcctgattgaactaatccaygtgtcccttcagttcacacattgcatttatttaagaagccttcctgcaagctcaggggtggcaggggtggcaggggtggcagacgagtgaggccctcagggagcagagctgagggagcaggaaggcatgtggggccctgacatgctggggcctggcacgagtccggcctgcctgccatgcttggagaagggctcagaagaggcaggcacttcttctgggggcaggtgtggggtggggacaagctgggagacagaggccagaaagactttggtaaggagtttctcctggactgactcattcattcatttactcaatccttcgtgcatgtgcgcatccactcaacatctcagtaatgaggacctactgtgtgccaggcactgtgctaagtgctggtgaggccctgctgtcatggggcctgcagtccaggactcaagttatcaccacacagatcaaagggaaaaccacgctgagttctggggctttgcagaacaggtytgtggagctaatggagctcataggagcttgacttggtcagggaggtcagggcggcttcgctgcggaagacttgtaggatggaaaggaattaaccaaggcaatagggaagagaagatccaggcagagggaacaggttgtgccaaggccctggggcttgatgaaggccagagtggctggggtactgcaacaggggggaagaggccaggaaatgggcaggctgactgtacccgggcttgtgggtgcctttagaaggtctggtctggactctacaagcaaaaggaaggttttttttagcagtggcataaaatgatccaatttgtgttgagcaggttcaagcaggcccgaatggaggcagggagtccataggggcgctgctgtgtccacataaatgatgagaatggttttgaccaagtgcatcttgcgatgggggaatgtgggtgaattggatgtggagtgaggtcaggcggtgtcgaggtctgagaaactgggctggtggatggggaaagtgacaatgaacataattttcctgtaaggtgtgtattttattttgtatggtaagtaatatcttcatttctaccaaggatagaaagaggcaattgttgagctttgggtaagaaagaagggaacgatttttttcttttttcttttgagtctcactctgtcacccaggctggagtgcagtggkkcgatctcagctcactgcaatctctgcctcccggattcaagcaattctctgcctcagcctcccaagtagctgggattacagacgcccgccaccacgcccaactaattttttttgtatttttagtagagacggggtttcgccatgttggccaggctggtcttgaactcctaacctcgtgatccacccacctcggccttccaaagtgctaggattacaggcgtgagccaccacgcccagccgggaatgatttttaatcattctactatttgstgtttaatatgttttctcactaaatctgttcaacaaacctgagaggcaaatactgttatttatttatgaggagagaggttcagaagggtaaagttacctgctcaaggtcacagctggaaagaggtgaagccttcagcaaaaaaagcaaaacaactcatttcattttattccgtgagctgataatggaggaaaaagtatttggcaagaagcggcagggaggggaacctggaggaactccctgctcttgaagaatgcaagggaggctgggaccttgtcactgaggagcccctggcatccttccagagatgcaaccaaaggggtgaccccagtgtgttcttaataggagccgggaaccccttctctgtgcacctcccacctcttgcccctgggaagtccttccctgactctaacctcagttctgatgctgttcccaccctctcagctctcaagcagatcaatgcaatgccacctggccgcttgctttgcccactgggcctacagccggaagcctgcccttcagccctcgggcctgatcccaggccgcctgcagcctgtaaccagacactgtttgcttccagcaggcaccccccgagcccagctccacacaccgttcctggatctcctctccccaggcrgagcgtgcccctgcccagtccagygaccttcgcctgttggagccctggttaatttttgcccagtctgcctgttgtggggctcctcccctttggggatataagcccggcctggggctgctccgttctctgcctggcctgaggctccstgagccgcctccccaccatcaccatggccaagggcttctatatttccaagtccctgggcatcctggggatcctcctgggcgtggcagccgtgtgcacaatcatcgcactgtcagtggtgtactcccaggagaagaacaagaacgccaacagctcccccgtggcctccaccaccccgtccgcctcagccaccaccaaccccgcctcggccaccacmttggaccaaagtaaagcgtggaatcgttaccgcctccccaacacgctgaaacccgattcctaccrggtgacgctgagaccgtacctcacccccaatgacaggggcctgtacgtttttaagggctccagcaccgtccgtttcacctgcaaggaggccactgaygtcatcatcatccacagcaagaagctcaactacaccctcagccaggggcacagggtggtcctgcgtggtgtgggaggctcccagccccccgacattgacaagactgagctggtggagcccaccgagtacctggtggtgcacctcaagggctccctggtgaaggacagccagtatgagatggacagcgagttcgagggggagttggcagatgacctggcgggcttctaccgcagcgagtacatggagggcaatgtcagaaagtgagttccggctgggctgcccggtggggtggatccgaggtgctgaggcaaggctggattctgagggccaaggaaggacttagcttgcaggcctttgaaccctgtggagcccgagactggcccattgcttcacctccagctgctggcaaagcagctgcaaatgcaccgaactgggagggcttccccacccctyaccagggagctggggatgagggacagagcgtcccttggacagacaggaaaaccgaggctcagaggagagaaactcacccgaggtccctgagagcctgctggcaccccgaatccagaaggagccccaacccccacgagtcagctggcctggcagggctccggaggctcccggcgaggcgggggtgggagcaggagcaggggttaggctggggcagccttccatgtacccctttccctgcatgcctggtagcatcctcagagcccctcccacacccccagctctggcacaccctctaaccttcctgttggggcagggtggtggccactacacagatgcaggctgcagatgcccggaagtccttcccatgcttcgatgagccggccatgaaggccgagttcaacatcacgcttatccaccccaaggacctgacagccctgtccaacatgcttcccaaaggtgagtgggccctgcctgcggccacagggccagggggcaggcaccctgggctggggtgtggggcaggagggtacgtcctcacacacacatgctccctgcccaggtcccagcaccccacttccagaagaccccaactggaatgtcactgagttccacaccacgcccaagatgtccacgtacttgctggccttcattgtcagtgagttcgactacgtggagaagcaggcatccaatggtgtcttggtatgaggctgggcccatctctccttcacgtgggctggccccggcttgaggggtcttcccgttctcttcatccctgtgccagtttctgaattgttaggccagggttggaatcccacctctgagtgatttcaggcaagtgtcttgttctctggttctccatttctgcacctgaaaaatgaaaacaatggtttctcttcatgaagggagttcctgacccaccggttaccagacagacggtggctatgatgattgttattctccaaaggcccttctctaggacccacagcctccagaccccagtagcgttcccctctgctgacsaggcctctaggtttagcttgattggcctccagccctggcccatcagggatccccccagcccactgggccctgggacccagcccacctgccccaggatcaaacaggagcccctggtctgcttcttcctcacaccttgcagatccggatctgggcccggcccagtgccattgcggygggccacggcgattatgccctkaacgtgacrggccccatccttaacttctttgctggtcattatgacacaccctacccactcccaaaatcaggtgagtgggggtccttgaggagggaggcagtggatggagctccactcccggagttcatcctgccaatggcatcgcctccccagaccagattggcctgccagacttcaacgccggcgccatggagaactggggactggtgacctaccgggagaactccctgctrttcgaccccctgtcctcctccagcagcaacaaggagcgggtggtcactgtgattgctcatgagctggcccaccaggtagacccccatctcggggagtgcggagaaggaaacaggggctccgagaggagacggcgcaagtccaggctctgccccgggctgctgagaagggaggagggtgccgcctggcagggcagcaggaaggggtcacgatggtgttgaaatccccaytgtgcctggcagatggccagccctggggagggtagttctggggattctcagtgcccagcctgggcgtggcttgcccagctgacccctccccccacagtggttcgggaacctggtgaccatagagtggtggaatgacctgtggctgaacgagggcttcgcctcctacgtggagtacctgggtgstgactatgcggagcccacctggaacttggtaagccagctgcccaggggtctggtgcggggggcatggagggagacctgggccaccgctaccaggccagtctcctgatggccctggggaatttgcagaaagacctcatggtgctgaatgatgtgtaccgcgtgatggcagtggatgcactggcctcctcccacccgctgtccacacccgcctcggagatcaacacgccggcccagatcagtgagctgtttgacgccatctcctacagcaaggtgcagcccgctcctcrtggggcacggggaaggaggtggggacttggcctggaggggcctcactgaaggcagggtctgggggcacagggtcctggtggctctgcacagccttctgagcgccccctcacccccaccccagggcgcctcagtcctcaggatgctctccagcttcctgtccgaggacgtattcaagcagggcctggcggtgagtactgcaccctgggccagccatgagggtgggtctccttctgcccctcgcccttgacccgggcctctgcccaccacagagggggagcctggggggctccagctgtgctctcactgtgccccrtctttccacagtcctacctccacacctttgcctaccagaacaccatctacctgaacctgtgggaccacctgcaggaggtcagtagcagccagcccctccacagccatcctgttggggtcttgagatgctgaaggtacctgggggcagcacatgcgtaagagaatgggtccagctccrcggctgaccagccctgcagggtggatggagcctcygttgctcctccctatagkggaagccgggatggctccttgcaagaggtgtctgagtgaggctgtggttgaggtcctggccagcagctgacctcaggctacagcgggctycttgatgggagctgtagagccccttcctggtggtgaggaaactgccctcatggttcccgcctctgcctggaactctggagcctgacattcaaccttctccccactcctggctgccctgtgccccccgctggcgccacgggcatgtctctgcacacagctccaccaccctcagcaggaactctgccctctgcccctgccccggctcgagttcctctccatcagaccccgcacagcccctgtttgtagggcagatccccagactgccacaccctcctgccttcccccagaggccgccgctcctctccctcccccagggttggagtccacctcctctccatcctgcccccatcatttccgctgacatcatttccctgacagctgccccctaccccttccctgcagctctgcccaatgctagcgtcttaagccagaggacagacatgtcctctcctcaccgacagcccctccagagttccgagcctcaaattcccgtccagcttctaccccactgttgctgctgcacttccagtccaggcctgtctcaccagggaagcgagacccaggatcttgtcacagagtcacagctgaggtccgggtccctgctgggcaatttccaaccccctagaccccaagatgctgctgacaaaatgacactgtcattgcctgggtctcccccactaccttccttgccctgccccaacttcccctttgcgttccctcctaagccaagctctcctccctctcactcctctttcctgagaccctcggccggcagcccccagctggttcctccccacatgctcttctgccctctgtgtggccccgttcttaggtgattcctttcttcagttattaacaaatggggttggctttctgttgtgatgacaaaggyaaggcaggtgcatgagcaaagatccaagaagacaagaagacaacaacagtgcccctgagtcccgccccacaccccagtccgagtgcacttccctcatgcgacccccagggccccgtcccccacccctgcctgtgacacctgaacactggctttctctcatctctgtctcctctttcttgtcctcctcccagtgttgttcaggaagagccatgggcatcctgggcaccccctccctgacatacacacctcagggtggaccacagaatggagggcctcatagatttgctgggaagttctccagctcgtccagcactgagcagccgaggagaggcagagctggacggtaccctggctcccggctcccagcccagtgcccttcccaggcctcccatacaagtggccccccggggtcgaggcgagaatctgcaggagatgccctggatggcagggactggagggtcccactgatggccacgccctctcgctccacccacaggctgtgaacaaccggtccatccaactccccaccaccgtgcgggacatcatgaacygctggaccctgcagatgggcttcccggtcatcacggtggataccagcacggggaccctttcccaggagcacttcctccttgaccccgattccaatgttacccgcccctcagaattcaagtgagcagatggggtcactgaggcatggtcaggtgggtggggtagagggcagttactaagggaccatagtaggactggcctcctgtggtcycagccccagccactgtagacagaccctccctccagagccaggagttcaggggcactcggtgccagagctgggcagaagctgggagcctgggcagctgctcctcactgrcagtgaccacaccgccatctctcaccacctctggatctttaattgcagctacgtgtggattgtgcccatcacatccatcagagatggcagacagcagcaggactactggctgatrgatgtaagaggtaatccagccctgccttatgggcagcagcccccaccccatactcctagctcctggcccatgttctgagggctgtgatgggccattccattcaacaaatggacttgacttctttggttccaatctccactttgctgctgcttcgctgtgtgactctgggcaagttaccatcccgctctggtctctagttcctcttctataaaatgaggctaagagcaatactccattagttatgtgaggattaaaggagagaatcctaggccaggcatggtggctcatgcctgtaatcccagcactttgggaggccgaggcgacctggggtcaggagttcgagaccagcctgacaaacatggagaaaccccatttctactaaaaatacaaaattagccaggtgtggtggtgcatgcctgtaatcccagctactctggaggctggggcaggagaattgcttgaacctgggaggcagaggttgcagtgagccaagatcgcaccattgcactccagcctgggcaacaagagcgaaactctgtctcaaaaaaaaaaaaaaaaaaaaaaggagagaatccacataaaatgcttaaagtagtgcctggcacatgttatgagcagccctactcagcaaggcactgaagaagcgaagggcatgacaagtcatcctttgccttggccaaggctacagatgaaggaaggcaagaagttggaggcattctagtgctgtgctgagtgctttcagagtgtatggttggggctagtgaggtatggggacatggagcagggaataagggagattcaagttcatggagaggtcagggagggcttcccggaggaggtgagctgagtcttagaggaagagtaggaatcagacaggctaatgtggcagagaaaagaattccaggcaaagggaatagcaagtgccagggatagaggtaggagagagtgtggggactgagtgtagctagggcagaggtgtgcccaagagataaagctggtccccaagggccccaggggctgcaggagacagtggatggggcaggtgggaaatgagcaacctattggccctgacctctggctgctgaaacaaagtatgagaggagtgagggaggagggggacccacagggaggaaggggcactaagccccagaaagagacagcagcactgggggtctgggtgaatgggaggggaagggagaggaggagctgcctgtggttcccacttgggtgacaggtgtgatggagtgtggaggagggcaaggaggaggaacagcctggattgctgagtgtgagcggcctggcagctggcctggccgtgcagagcctagggaggcagggcaggttctgaggtttggggtggcatgtcatcttcatgggttgatggtctgtgaagccactggcagcccagttcctcatcccttccttccccacccttagcgtctccccagcagcttgagggtgaggtggtgccaggctgcgggggcagctgctcttgcaagaggtccaggggtcagcccatggcctctgagcagccctgcccaggtctcgtccctctccacagcccagaacgatctcttcagcacatcaggcaatgagtgggtcctgctgaacctcaatgtgacgggctattaccgggtgaactacgacgaagagaactggaggaagattcagactcagctgcagagagaccactcggtgagtgtctgccacccctcgccctgccccctgccccaggacaggcaccagactgcaaggcctgccacccacagccaacccatggtcacatgctgtgcttcgcattctaggccatccctgtcatcaatcgggcacagatcattaatgacgccttcaacctggccaggtgagtgctccgctgcctggctcagctgcagaagctcgtgacttcagcaagtctgagtccacaatgagggcccctgctcctcctgctgcccttcccatatgccacgtgctgtgccctgagctcctgtgctccctggaygtccctccctgggtccccacacacccatttcacagatgaagaatgtgacaccttgcccgaagtcacacagtagttcatgacagccagacagaggcttgtccaactccaaagccatcctctactccacagcaccaagctttttgtttttgtttttgtttgtttgtttgtttgtttgtttkttttgagacggagtctcgctctgttgcccaggttggagtacagtggcgcgatctcagctcactgcagcctccacctcccaggttcaagcgattctctgcctcagcctcccgagttgctgggattacaggtgtgcaccaccatgcccagctaatttttgtatttttagtagagatggggtttcaccatgttggtcaggctggtctcgcactcctgaccttgtgatccacccacctcggcttcccaaagtgctgggattacaggcatgagccatggcacctggccatgcccccccgctttttttttttgagatggagtcttgctctgtcacccgggctggagtgcagtggcgtgatcttggctcactacgacctctgcctcctagattcaagcgattctcccttctcggcctcctgagtagctaggattacaggcatgtgccaccatgcccagctgatttttgcatttttagtacagatggggtttcaccatgttgaccaggctggtctcaaactcctgacctcaggtgatccacctgccttgccatcccaaagagctgggattataggtgtgagccaccgtgcccagctgcaccaagcttttcctgaaggctgactatgctgggccactgttctaagtgccaaaaatctgggctggacagggcaggagggatgcagtatggataaacaggtacttattgagcacctactctgtttggggtgaggtactctaagctcttggacatgagtgatgtcacccacagacaaggacatttgtgagctaaatgtgtacagaaggcaggaggaagaaaggcctagagtgcccakaaagtcagaagaggtggtcagagttaagaacacgggcttcttgcccttttaaatctcagctctgtctctcgtgaggtgtgtgaccttgggcaagtcacttcacttctctgagcctcagtttcctcatctgtaaaatggggataataagcaaaggagtggaactgccaatgggtgagggtggggccttgtttgtggcaccacccagcagccatgtagctctttttccatggcaaatgcctgagctggctcagttgggaatctgggacctccggctccaggagtggatacagggggcctaggggtgtggagcatctttgagggcctgggttggggttcccaggctgtggctgggctgggtggaggtgctttacttgggcccctctgtttattcccagtgcccataaggtccctgtcactctggcgctgaacaacascctcttcctgattgaagagagacagtacatgccctgggaggccgccctgagcagcctgagctacttcaagctcatgtttgaccgctccgaggtctatkgccccatgaaggtacggaggtgcatggtagggttcaagaaccagttcgccccagtgcctgaaagtgcactattaggaagttaatagamtatkgcctaytggactcctggtcagggaaccttcaaaagcaaaacaaaaaaccaaaaaaaaagaaagattgccttgtcaggttctctcctgagagcacgcaggtgaaagagcgagccggagggacatggaggtgagtgagcaggcactgaggaggtgagtgaggaggctgcgtggggcaaaacaataaaggtcgsggagacttcagcaacgtttgttgatttgaaatatggggaattaacgctttcagaaggcacagaaaaggccaccatgctgagggccagaagacctgtcttttgmcagctgtgtggccttgggcaaccctttctcagacccagttaacttctctgtcagatgggcaggcctctacctgcccggccagcccacctgcgctatgagagagatgtgggtattggctgctttggagtatcttaaggctgagcataggggcctatttgagggctgaggctcccgcttgggagaccaaaaggaaactcgagcttattctggatgaataagctacatccataggatgctcactgcagcagtttataaaagacaaaaagcaaacaaaacacaaatacttaaacgtctaaaggttgaagattggttaaactgtagaatatccatttcagggtgtgatatgtagtcattaaatcatgcttgaagagatcttttttcattaaaaaatgttcaattatcaggccgggtgcagtggggctcatgcctgtaatcccagcactttgggaggcygaggcaggcggatcacgaggtcagcagatcgagaccatcctggctaacacrgtgaaacctcgtctctactaaaaaaaaaaaaatacaaaaaattagccaggcgtggtggcgggcacctgtagtcccagctactcgggaggctgaggcaggagaatggcatgaacctgggaggtggagcttgcagtgagccaagatggtgctactgcactccagcctgggcaacagagcaagactccatctcaaaaaaaaagaaaaaaaaaaagttcaattatctgttaatatccattatggtaaatgagagattttggtaaatgaagtttcaaccctcttactgctttccccacattccccatcctcctaatgtagttaaatcataatatttagtcaaatcagtgttaagcatttgctttattgtgattatctaaatagtattctctgctgagccatgtagagcactatgttkatgtttccttttttgtacacagttacaaatgtatcacacaataggtcaagtttttgtttgtttgtttagagacaaggtctcactctcttgcccaagctggagtgcagtggtgcaatcaagcttcactgcagcctcaaatacctaggctcaagggatcctcctgcctcagtctctccattagctgggacctcagatgtgcaccaccatgctcttttgtagagatgcatcttttgtagagatgggatctttctgtattggccaggatggtctggaacacctggcttcaagcaatcctccctccttggcctcccaaagtgttaygattayaggcgtgagccactgtgcccagcccagttttgagactggactcctcctggagtcctattctgcctgctctcttccagagctgccacacagctcccatgcttggaggtgcctccctctactgtgtttcctgcatcccatggattctttgattttttcccctctcataggggaatacatcttccaggagtttttgagaaagggttcatgagaggtgacttttctggggtagatcatctgaaatgtctttattccactctcacactggattgagcgttcagctgagtttagaagtttcaaggtgggaaattatttctctgaatgtttaaggtcttgctccactgatgtcaggcttgccatgttgctgatgcgatgcccagagccattcttatttccagttatttgaatgtgaccagttttcctcccttctggaawctttgggagcttctctcggtcctggtgggccttggtttgggcctcgtctccatctaccttttccaatcaggactggcattcacatcatctagtattggaagattttgtattgcttctttaaactttattcccttcactttttccagktatctctttctggaacccctgtaatccagcttatttctcttgctttcatcctctagttttctttttctcttctgttttccagcttgttgactttttrttctgccccctgggaggttccctcagctttgcacaccacctcacctagaaattgttttcatttcttctgtcgtatttttaaatttccaagtgttctttctgattccagcatcctatgcaatatcttctcttcactctcagaggatatttattacaggctcttatgaagttttcctttttttttttttttccattgactcgtttcctcttgagttttgtgtttgttttggcctcttttcaagttggaggctgagccacccctttggrtttgagacagacacaaacaaaatgcaagtggaagctccatgggaaggtggagygtgttgtccgggggatctcattgcgaggtgactgggtggccaagtaactcttcactggggaccctcaaaaattagtccatgggtttgttctctcgagacmaggcagtttttccagagagtaagcctctgtmttgtgcaatgaggctggtagtactcccattctrggacacaggagggaagggaactggggtgccacctttcagtatggaaactttcacctctgaccctctttgcaatccagcaaccctcccactgtggtctggtgaccccactttctgagccccctggttcaatctctctcatggggtggtgaggggtgctgccctctacaaggagggaagtggggacttgggggttgaatgactccttctgtagactttgacttcatcttcctgtttgcagtccttacctcccctctgtcccttgctgacttgtccctttaatttttttatttatttttatttatttatttatttttgagacagaatcccactctgtcacccaggctggagcgcagtggcccgatcttggctcacttcaacctccacctcccrgattcaagckattctcctgcctcagcctcctgagtagctgggattacaggcgcctgccaccatgcctggctaatttttgtatttttagtagcttcggggtttcaccacgttggccaggctggtctcaaactcctgacctcaggtgatccgcccgcctcagcctcccaaagtgctgggattacaggcatgtgcccccatacctggccttgtccctttaattctgagtcttgtcacagcaagttcccttgcttctgtctccccttctgcagattctcaattgcaaattctcccactctgccaagcctggtacatctccctttctgcgcgtcccagctgcctaaactatattgaccttgcatccgctgttgcctctcctgttctttgttattgggggtttattccttttacatttggacgtggatccaggtgggcacagaaatcaacctgccatgtcaaaccagagtccacaaaggattttactagcatggggtggggcttacactacaatgttaggagaaaaatgccatgtgaagaatatgctaagtaaaaaagaaaaaactatagaaaaaagaaggtgtaaatgcatcaatgtggaaactgtagttttggtgagctcctgggtgtgttttattttctgcatatacttctctgtgtttcccaaattccctacaataagtcatggaatttttttttttttttttttttgagatggagtctcgctctgttacccaggctggagtgcagtggcgtgatcacagctcactgtaacctctgcctcccgggtttaagcgattctcctgcctcagcctcccaagtagctgggaatacaggtgtgcaccaccacactcggctaatttttttgtggttttagtagagacgtggtttcaccatgttgcccaggctgatctcgaactcctggactcaggggatccacccgcctcagcctctcaaaatgctggaattacaagtgtgagccactgcgcccagcaactcatggaatatttatgattgtgtagggaaaacccaacattttatattaagaaatggtgacccgtagacaaagaatattgcaactgactaaggctttaagcagaaagaaactcagctcagttatttgaactctagacttctatgggcccctttgagcactgtttggcctcaggtgaggccctgacctctgacgtctctgccagcgcctgccccccaacatcagaggctctgtggggctccaggcaggtcaggcatgagtctttgatgagattcatrttttcttttccccagaactacctgaagaagcaggtcacacccctcttcattcacttcagaaataataccaacaactggagggagatcccagaaaacctgatggaccagtgagtgggagctctcatgggtttggaagtcctgggcaccccggggagtcaagagcaacatcctggcagtgttctctgccgcagctctcaatgcgggggcaccaggcagggagagacccccacccaggagcagggaggtcctgccctgaggctccatgtggcctgagggcccatcggacctctttatacaaagacccaaactgaaactctagctcaccccactggcttgaggttatacagtttctaggtgttgaaactggggctggagcctgttcctgcccttctgggtcacagggctgctttggggaccaaggaacctcaggcccaaggcacaaagcacatacagsgggggycagagggccagttaggccacagagccttaggcagggtgccggcctggggttgtgtgtcaagaggtgaatcttggctggagttcgccaggtgtgctaaccgcgtgtcacccctggggcaggtacarcgaggttaatgccatcagcaccgcctgctccaacggagttccagagtgtgaggaratggtctctggccttttcaagcagtggatggagaaccccaataataacccgtgagtgtctcccctgcgcctcctctgccagtcttcatctgcccccaacagccccgtcctcagcagaaccctgtcccaccctccccgctgctgttccacacctgacctccctaccccacaccaggatccaccccaacctgcggtccacygtctactgcaacgctatcgcccagggcggggaggaggagtgggacttcgcctgggagcagttccgaaatgccacactggtcaatgaggctgacaagctccgggcagccctggcctgcagcaaagagttgtggatcctgaacaggtgagtcttggsgcagggtgggactgcgagagccctctccccacctggagaaccaggcaggcctccacactcctcgccagatccttcacgtgacccccacagacctgttgaggtggaggcagtatttccaaagtaaccggtgcagactggaagctttaataagtgatagagacaagatatggactcaggtctgggtccatgtcctctgttcctagctgctgtggcctcttagcctttacctgacaacaactcgtcttcccttctgtcaaaggctctggtgtagctggacctgggtcttttcaaacatccagctgggcaccccctcaagcccttggatgagggtccccacctcccaccatgtgcctcatatgccattacctggatgcagtaaagaagagccacccttgggcagggtgtggtggctcatacctgtaatcccagcactttggaagacygaggtggayggatcacctgaggtcaggagttcgagaccagcctggccaacatggagaaaccccgtctctactaaaaatactaaaaatacaaaaaaaaaaaaaaaawaggcatggtggcacatgcctgtaatcccagctacccgggaggctgaggcaggagaatcacttgaacctggcaggcgaaggttacagtaagcccaaatcgctccactgcactccagcctgggcgacagagtgagactccgtctcgaaagaaaagaaaagagaaaagaaaagaaaagaaaagaagggccaccctcagtgtcaaagacgggagtgaccacccacctggtgccagggcttggggcgctaggactccttccttcattgattcattgtcaaatatttctatgtcaggcatgacactagcttagccagtgaccctgtgaccctgcttaggtgactcagttttccatctayagagggaagaaggaccaaggggtccctcagcccctggcaggccgaggggatgttgagaggaygcaggcataggtgatgtgcgtgggacagtccaagttctctcctgagtcacctgaattagcagtagctgasacagcatctggccctcttaggtacctgagctacacmctgaacccggacttaatccggaagcaggacgccacctctaccatcatcagcattaccaacaacgtcatygggcaaggtctgrtctgggactttgtccagagcaactggaagaagctttttaacgagtgagtctgtggaatgggtgtcagggacagcgagcgcygaggctggggccycggggggtggcctgtgcgggtaagacacgccgggggcactaaccagaagtggacaaaaatcagccaagcctgggggctagggtggggcaggaatggaaagacaagctggggtatgggccgtcccttttcccatttggaaggaaaacgtggcgkgtgggcgtattctccagaagagaggggartgaggaactcggcagtcagacctgtgttcaagctgtgactcccccacatcctagtggggtctcccagggcgtgtcatttcatctcctctataatcatggytccctacccagtaggtgtgaggatgagcctccttagttcccggcctccctcacagttcacctctctccctccctgcagttatggtggtggctcgttctccttctccaacctcatccaggcagtgacacgacgattctcmaccgagtatgagctgcagcaggtaagaagtcattccccagacctgggctctgcctacwtccttcccaggccaaaggggcactccattcttctcccrcgtggccctgagggagcacaggctccacgccgccaggccttcctcatttayagaggaagccgagtagccagactttggaaatgttgataattcaattwaaaaaattcatcttgggatttttgtataggcacaaaagggaagagtggtataatgaacctccatgtacccgttacccaggttcaacaattatcaacattttgccagtactttttccgggcgggcaatttttaagcaaatcactgatcatgtaattttacctctaaataatttagtcatatgaaaaataaacgcattcttttattttttttattttttattttttttttgagatggagtcttgctctgtcacccaggctggagtgcagtggtgcgatctgggctcactgcaagctccgcctcccgggttcacstcattctcctgcctcagcttcctgagtagctgggactacaagtgcccgccaccgcgcctggctaatttttttgtatttttagtagagatggggtttcaccatggtctcgatctcctgacctcatgatctgcctgcctcggcctcycaaagtgctgggattacaggcgtgagccacggcgtccagcttttttttttttttgagactgagtctcgctctgtcatgcaggctggagtggtgcagtggtatgatctcggctcactgcaacctctgcctctggggttcaatcaattctcctgcctcagcttcccgagtagctgggattacaggcatgcgccmccamacccggctaatttttgtatttttagtagagacgaggtttcaccatgttggccaggctggtctcgaactcctgacctcaagtgatccacccacctcggtctcccaaagtgctgagattacaggtgtgagccactgcgcccagcaataaagggattcttaaaacataatcacactgtccttagcaaacccaggaaaatgattatcttcttactatcatatacccaaggcatattcaaattttctaagttgtttataaaaggtctttttacaattgatatatatgcttgaattagaagcttgacaaagtcaacttggattaagttagtttgtcttttttaaaaattgagatataatttgctgggcgtggtggctcacacctgtagtcccagcactttaggaggctaaggtgggtggatcacctgaggtcgggagttccagaccagcgtggccaacatggtgaaaccctgtctctactaaaaatacaaaaattagctgggtgtggtggggggtgcctgtagtcccagctactcgggaggctgtggcagaataattgcctgaatccaggaggcggaggttgcagtgaaccaagattgtgccactgcactccagcttgggcgacagagtgagactctgtctcaaaaaaaaaaaattgatatataattcatggaccatcaaactcaccattttaagtggttttcagtaaactaacaaggtagggtgggtggggtgcttcatgcctgtaatcccagcactttgggaggccaacgcaggaggatcccttgaacccaggagtttgagaccagcctgggcaatatcataagatctcatctctaaataaataaataaataaataaataaataaataaataagctgggcatggtggtgcatacctgtagtcctagctactcaggagactgaggtgagaggatcgcttgaaccaggaaggcagaggttgcagtgagcggaggtggtgccaccgcattccagcctgggtgacagagcaagaccctgtctcaaaaaaccaaaaccaaaccaaaccaaacaaacaaacagaaaaaaaccatgtggtacaaccatcactactgtctaattccagaacatttttattacgccaaaaaaaaaccttgtactcattagcagtcactccttattcctacctggtcccctcagcccctggcaaccactaatatactttctgtctctatggatttattacctattctggatgtttcayaaaatggaatcatatayacacagcctttttgtgtctgtctgccttctttcacttagtrtaatgttttcaagattcatgcatacggtagcagggatcattcttttttatggctgaataatggtccattacatggatgtaccacattttgttttcagctcatcattgatgggcatttgggttgtttcagtcttctggctgtgatgaatatcatggaccttcacgtgcaaattttgtacaaacatgttttaatttatcttgggtatacacctwggagcggaattgctgggtcatttggttactctgtgtttaactttttgagaaactgacaaaatgttttccaaagcaactgtaccattgtccattcctattagcagtgtatcacatgagggttctaattgctccatgtctacacttatctctctttccctctttttttagtatagtcatctagtgggtaggaagtggtatcattatggttttcagttatatctccctaatgagtaatgaatgacatgatgttgaatatttcatgtgcttattggccttatacacatttgtgtatctttggagaaatgggtaaaactgactatttttcttttcgagagagggtcttactatgttgcctaggttgtccttaaattcctgggctcaagcaaccctcccacttcagccttctgagtagcttggattacaggcatgtgccactgtgcccagtcttttgctattttaaaattgggttgtctttttattstaagagttctttatatattctgaatattagacccttaatcagagatagggtttgcaagtatttctcccattctatggactgtcttttcactcacttaataggtcttttgatacccaaaattttaaatcttgatgaaatcctatttatctgttttttttccctttggttgcttatactttatgtatcatatctaagaaagtattgtctaacccaaggtcatgaagatttatacctatttttttatttcaaaaaaatttttcaaacccacaaaagacctgacgatgttttttctaagagttttattggccaggcatggcggctcacgcctgtaatcccagcactttgggaggccaaggcaggtggatcatgaggtcaggagttcaagaccagcctggccaagatggtgaaaccccgtccctactaaaaaatacgaaaattagctggatgcagtggcgggcgcctgtaatcccagctactcgggaggctgaggcaggagaattgcttgaacccgggaggcggagtttgcagtgagctgagatcgcaccactgcactctagcctggatgacagagcaagactctgcctcaaaaaaaaaaaaaaaaaaaaaaagagttttattatgttttcactcaaacgtaggcatttgatctattttgacttaatatttgtatatgatatgaggttggggtccaacttcattccttttgcatgtggatatccggttgtccaagtcccatttgttgaaaagactgttcttctcccactgaatggtcttggcaacctagttgaaaatcaattgacggtaaatataagggtttgtttttggattctcaattctatttcattcatctatatttgcatccttatgcctgtaccatactgtcctgattactatagttttgtagtgagttttaaaattgggaagtgtgagtcctccaatttgctttttttttttttgagaaagggtctcactctgtcacccaggctggagtacagtggtgagatcacagctcactgcagcctcaacttcccaggctcaggtgatccccccacctcaacctcctgagtagttgggactataggcacatgccaccatgcccggctaatgttctgtatttttctgcagagacagggtttcaccatcttgcccaggctggccaactgtgttctttttcaatattgttttggctattctgggtcccttgcaatttcttatgcattttaggatcactgatcaatttccgcaaaaaaaaaaaaaaaaaagtagttaaaattttgatgggattgaatctctagagcaatatggggactattgccatcttaatgatgctaaatcttccagtccatggacacagatttatttgggtcttttttctttttacttaggtgttctttaatttctttcaaaaatgttttgtagtttttggcattccagtcttgcacttattttgtcaaatttattcctaaatattttattcttgttgatgctatcgtamatggaattgttttcttaatttcattttcaggtttttcattgctaatgtatgggaatacaattgatatttgtgtattgctcttgtatcctgcaaccttgcagaaatcattagttctaatagattttttaatggattccttaaaatttttatgtatgcaaacatgtcatacacatagttttacttcttcctttcyggattcctttcatttcattctcttggctgattgcctggctagaacctccaggactgataactcttctaatttgtaggagtattttttttttaaacccatttatttactgaagcaactggatcatttgtggtatagaaatttccacattttagatttggctggttgcttcattagcccctctctactctcttgattggattgatattataataaaatattacacctgaaggccagaatctccctgagccaggttttgcctgggattgtcattttgcaacctctgtgttcacaaggactttgcccgggagcaaggtggacgtcctgcctatccctggaacagggtgtggtcccatccatggggactctaaagwgggagtggaaagccagaggcctgagagagctcctcctcaaggctgttagggacccagccggactgagaatcttttgtttttctggcagctggagcagttcaagaaggacaacgaggaaacaggcttcggctcaggcacccgggccctggagcaagccctggagaagacgaaagccaacatcaagtgggtgaaggagaacaaggaggtggtgctccagtggttcacagaaaacagcaaatagtccccagcccttgaagtcaccsggccccbatgcaaggtgcccacatgtgtccatcccagcggmtggtgcagggcctccattcctggagcccgaggcaccagtgtcctcccctcaaggacaaagtctccagcccacgttctctctgcctgtgagccagtctagttcctgatgacccaggctgcctgagcacctcccagcccctgcccctcatgccaaccccgccctaggcctggcatggcacctgtcgcccagtgccctggggctgatctcagggragcccagctccagggccagatgagcagaagctctcgatggacaatgaacggccttgctgggggccgccctgtaccctctttcacctttccctaaagaccctaaatctgaggaatcaacagggcagcagatctgtatatttttttctaagagaaaatgtaaataaaggatttctagatgsgtgagactcattactaaactaaagcaggagtgggtcaatacagcagctggggaggccgggtgggggaagctgggtgcatgcggagcaccgtggagtctgggaccccagagcacaggaggggagacgtgcccagcctgccgkcccttcctgcaggtgccctgcgcctgtgcctccatgtctgcctgcaggactccgggctccttttcatgctctattgactgagctagctgggtggtttgcagggctccttttattcctattctgatggcagctggagctgctgggtggtggggagctgtggacccagtgctcccgcagtgagtggtgagaggggccctggcagagcgcagggagtgctctccaggaagcaccctccttaacatgaggcaagggtgcagggtgctggccgtgcccctcttcctgctccacgggaacacctgggatacctgggacaatgmgggacaggtctgtgcagtgaaggcagcaagcacagggtcccatacctggtgccacccttcactggccaagggcacgccccaccgtcttccgtggtggaagggtggagtggggtgtgggtaccaatgcataaagaggttgttttctagagcagcacacagggatgggctgggctgaggagcaggcaaaccatggggtggggacagctttgccaggctcataaagtgggggctgtgccctccacatcgcctggggcagaagatggtcagggccaactctgagaaggcctgggaccagcgcagctccacgcacacattggccctggtgagcatttcttgacaaatggagccccactgtggcaggctcccctcagcctctgccccgcaaggcccagttgaacatccaaggctgagaggagggggagaaggcgggaacagccacaggggtccttaggagtcacctccaacagacacccacagccagctccgcaggctggaatcatggagtccagcaggtctggtttcagtttcttagacaagggacccacatgcccaagcctaggtctcatctgcacaacgaggcagtgtcagagctgttgggctggtgtgtggattgaaggagatacatgtacttagcaaatggcctgacgcataaggagagctgggttttattatcacccttggccctcttcccccttgtgagaagcaggcaggcctggggccaggaaggccccccatcccccaccaccatctgcacatcaaagagtagggtgagctaagggcggaggccagcccggatgatggtgctctgtccctccaccagccaggaggctccctgggccgccccagattaagctccgccagccactttgggccaacccttcctgtcgccagtacccagcggccgtggctggcacttgaccttctggggaccagctgtgggaggggccggcctcaccatcttgagtttctaatgggctctaggatccctggacattgcagaggagagagctggcctgccagggagaagagtttatgcacattatttcatttagttctaaaccgtaccatgagataaggaatatctttatgtcagctttacagataaggaaactgcagggcaaggagatgaagtcacaactcagtagaactgaactggaaccactgtctggctttactccctgcacagaagtggaagccagttctccatctggagctggggtggagtgcgtgacgtctatactgccatgcttgtgccgttactggaaagaggtctcgatccttggagcccatgcaagaaagaattcagggcaagtccataaaatgaaagcaagttattaagaaaggaaaggaatcaaagaatggctactacacaggcagggcagcagcatgggctgctcaactgagtaaacttaagagctatttcttgattttttttttcttttttttttgagacggagtttcattcttgttgcccaggctggagtgcaatggtgcgatcttggctcaccacaacctccgcctcctgggttcaagcgattctcctgcctcagcttcccaagtagctgggattacaggcatgcaccaccatgcccggctaattttgtatttttattagagatggggtttctcgaccccaggagatccgcccacctcagcctctcaaagtgctgggatcataggcgtgagccaccgcgcccagccttatttcttgattatatgctaaacaaggggtggattattcatgagttttttgggaaagaagtggggatttcccagaactgagggtttctcccttttttagaccatacagggtaacttctgcatattgctgtggcatttgtgaacggtcatacgctggtgggagtgtctgttagcagctaaggtattataatcagcgcataatgagcagtgaggatgaccaaaggtcacttttgtcaccatcttggttttggcgggttttggctggtttctttactgcatgctgttttatcagcaaggtctttgtgacctgtatcttatgccgatctcctgtctcatcctgtgactaagaatgcctaacctcctgggaatgcagcccagcaggtctcagcctcattttgcctagcccctattcaagatggaatcgctctggttcaaacacctctgacgatgccacctggcagtgtacaatgctggcactcatcaggacctccatggctgatcctggaatgcagtgaggatacacagagccagaggaatgcctgcagagccttggtcaaggtcaaagagcaggaaccaactagaactctggcggctgattccctgcccagcgctcttgcctgccctcagcactcaagtccagcaggaatggaaggtgctgaggctctgtaggcagcagccttggtggctcctctgactcagcctttcgagactgtggagtcagcatagctaacgcaatctttcattttctttttcctttttttgttttgtttttttttttttttggagacagagtctcactctatcgcctaggcttgcagtggcacgatctcgctcaccgcaacctccacctcctgggctcaagcgattttcctgcctcagcctcttgagtagctgggattacaggcgctcactaccacgccaggctaattttttgtatttttagtagagacggggtttcaccatgctggccgggctggtctcaaattcctgacctcaagtgatcaccccaccttggcatcccaaagtgctgggattacaggcgtgagccaccatgcctggcctcagtactcattttattgagcacttactatgtgccaagtattaaaaccctgagaggtaggtctattattgtctccacttcacagttgaagaaactgaggctcagggaggttccaaagcttatctgtcagtctcacttggttacacagcaagtaagagccgagtagaatgcgcaacctgggccccaatgctgtgtgtctactctaaccttgcctggatttttctcatccttccagctgtggctgacagcccctcgggacagcagggccctaagggcagaaccagagcacttctggaaggttagaggaagaaggtacctcagcaccacccaagatagttcctcctttaggaactgtgaaaactgaagctcagaaagagtgacttgcctgatgccacagggcgtgtcagaggcaacgggcaaccttgcaggatgagaggggaaagccccacacgccaagagctcaagcccaggaaatcaggcagctcatgctctgtgctgcctctccctttctctcaagctggactgttgcagtggcctcctgcctggttccatttctatgaagcggccgaagggactgagagcagacttcttaccagctcacccccaactcccaaccctcagtgctgcccatcattcgggaaacggaggccaaaacctcatcacccaccacgtggaactccccacaaacttgcctccaagcccctttccggctctgtttgccacttttctctgtcatctctagacactagacgcttctgtttcgacttggctcatgctgttgctcctgcctggacctctcttccctcactcctcttgataaactcctgcatatccttcaacacccagctccaaggtcacctcttctgcactctctcctccctgagtcagcagatacagaaggaagttaccaccactgctggctcccatgcccacgggagcctttgctaatagatcttggcatccttttcccaagatcctggcagtgcctcttactcttaagacaccgcaatcaaggcagcaggactaaggaatcaggtaactcaagaatgagatggtactgccaacctcgcctcccaccaggttaccgcatcctggtccctaagcacctcacacaaacccccatccttgtgtttaggacctgggctctgatcatttatttccctgtaattcacattagttggggaatattttctctctggcacctaacacatggtgttatgggctgaattatgtccccataaaattcctgtatggctgagcgcagtggctcatgcctgtaatagcagcactttgggaggctgaggcggctgaactgtgttcccataaaattcctatgtctggctgggcgtggtggctcacgcctgtaatcccagcactttgggacgccttggcgggtggaccattggaggttaggggttcaagaccagcctggccaacatggtgaaaccctgtctctactaaaagtacaaaaagtagccagccatggtggcaggcacctaggccagctactagggaaactgaggcaggagaatcacttgagcctgggaggcagaggttgcagtgagctgagatcatgccactgcactccagcctgggcgacagagtgagactccctctcaaaaaaaaagaaaaaaaaaatttcctatgtttggctgggtgtggtggctcacacctgtaatcccagcactttgggaggccgaggcaggtggatcacttgaggtcaggagttcgagaccagcctggccaacatggtgaaaccctgtctctactgaaaatacaaaaattagccgggcatggtggcaggcatctgtaatcccagctactcaggaggctgaggcaggagaatcgcttgaacccgggaggcagaggttgcagtgagccgagattgcaccattgcactccagcctggacgacagagcaagactctgtctcaaaaaaaaaaaaaaaaaagaagtttcttatgtttaagccctaacatccaatacttcggaatgtaactgtgactgtattagaagaaagatccctaaaagagtaaatacagttaaatgggtcccttagggtaggtcctgatccaacatgactagtgcccttataagaaatcaggacacagacaatagagacagatgtgtgaccatgtaggggctcaacgaacaggcagtcatctgcaagccacagagagaggccccagaagaaactgaacctgcctacaccttgatcttggacttctagcctccagaattgtgagaaaataaatttctgttgtttaagccacccagtctgtggttgttgtttttttaagttttttgtagggacaaggtcttgctatgttgcccaggctggtctcgaattcctggcctcaagggatcctcccacctcagcctctcaaagtgctgggattacaggcgtaagccactgcactcagcccgtggcattctagtatggcagccctcgcaaactaatacactgggcctagcacgtaggaaccactcccagtattctttgaagaaaatttcatgtcattgtgaaagagccctaaatgacaggtctctgggactgtggtctccccatttggggctcctgtctgtctgtccacagctgcatgcacccaccccagcagtcaccaggaatgcacccgaagaacacaaaagggcagtggtgatgtggctgaggcaagtgggcaggcccaagcttagcccacctgtgctaccttgcacagcaagccaggtggagcttttggccctggagctccagtgcaataaatatggtcaaactgacaaatg

SEQ ID NO: 8781 - DNA, 18320 bp, Homo sapiens
ttttggtaagcctcgaaaggtgagcacctctctgcggtatcctccctatgttcccagtttcaggcctggggagctgccatctctgtctcttccactcctccttgctggtatctgtgggactggttggtttagatgcaggagtaccatctctccaactccgttttgtgtgtcagaaagctttgcttgtttgtctttaatacgccaaatctcctgtttctaaccccctgacttccatctctccagtttcccagtcctgcaagagtcctttgctctgctcttgcagtttctccgtgtgttcttcagcaatatgcaccctgatggtttgcactttctatcgtgtttattattctaatggctaatgtccatgttaatatttctacttcattgcttttctactgcctcttgcttgtgtcatgtgggcagtatcttcactgatttctctatggatattgattatacttattttaaattactggtattcctttccaataattttgcagccagtagtgtgtgcttctggtccttatctttccattgtgctgatcgtgcccctctcagcctgctctttatcttagcagtgagcaacctccttttgggggtgtagcctgtctggtcacctctgccacatgctgctctaggtcaccaggtgagccaaagcagaggcagagaatgggcctggacaagaagtgtccctggccccagaaacctatcaatgatggtcacccactaggaaattcttgttttttttttttagagagggaagctgccccagagggaggacgctggtggaaggaatataccaggcctgggagtgaaggggcagaaggaagaatggcagtaaggaatgtctgaggagagtctgaaagccacatgtgttctgatttctgtggcaaaagagcaggtctttgctrtcctaactactgagctgcctttcactgcagccaccctgtgttcaaggccatgtcacagataagcatgtctctatcacatgggcagatatgacaccctctgaccacccaccccatggctataggggcctaaggtagtccttgccagatgcagtgggcctgtgtatttgtgttggttaaaaagaaggcctgtgacatttacacattctcagagagttcatgagcaaaaacaagcaaagaaaaaatagcaggactggaacacaggacagtacaggatgaaaagtatgggaaggtcaggccttagggttacaaaggacactgctgacaacaagaaagcagcctaccgctgtcagctgtctctcacagcctgtctctcatggccagaccatggtattccctgctgaccctaaacacttccacagaataccggtgtacaacaatattactctgttgtgagatcccaaatcattscaaaatcatgtcttcatatagacagaaaaggttgctctgtgaaccacaaaaacgaaaaacatgcccctctcctgcttaatataaacatctgccactcttttacaaaatacagcttcgccttgctctgttctacttatctcctaaataaaagttaagatgcacaatcacagaattgcccagcttacggacagcaccctatccagaacagactcctgcttctcaaaccccttcccccaaaaccacctaaaacaaaacaagtcttatagaaatcccctcccgacaccctgttactgagaaatcctagggtacaccattgtgctcaatatccctgttggaacaaacagttaaaagaaactaaaaataataaatccattttatctgactataagcatattcctgatggtcctcacttggagagcaataacattctcattgctattgtcctactcacagcagctctgtggaaaagggaatgaggttcaaaatctgatttgaaagatgtaaaactgaggttcggccagaatatggggtctatctaagctcatattcatgagacaaaaccaagccttctggtttccaatctcaaaccatgcctctcacatggagccacccaagaacactgcttcccaagctgagaagactcttgaacagtcaccctggagggaatgaaggcctttcttaagcaggctgtcatggtgagccacgtgccatgcactctgaatgtggaccagttaaggacacaccactccacagccaaggcagcggtgccctctttcccagacgaggaaactgaggacatgaaggcagtggaacttgaataaggtcacactgttgggaagtgggagagctgggatttcaccctagtctacaaaaaaggggatgtagggcaccaggcagtcctcctgcaggtcagagaggcagttttctctgcagcctcttggggtgaggtggatttgttgtggcgctgccagaatggaagcagtgttaggaaagtggaaagttttttttttttttagacggagaggctctgtcgcccaggctggagcgcagtggtgcaatctcggctcactgcaagctccgcctcccgggctcactccattctcctgcctcagcctcctgggtagctgggattacaggcacccgccaccacgcccggctagtttgttgttttttttttttttgtattttttagtagagatggggtttcactgtgttagccaggatggtctcaatctcctgacctcatgatccgcccgcctcggcctcccaaggtgctgggattacaggagtgagccaccacgcctggctgggaagggttttaaagtccagaacaaatgcacacagtggccttatctatggggtggagtgcagagtgggcattcgtgtggagagagacattcaggctgcggcatgtggagagtggcctctccttttgggaaaggccttctggagagcaggatgtaactgggcgacactccaatctccggatcaattgctagattgactttcccccagatacccacaccctctgaacccagttctaggaaatttcagggtctggagagcagtttcctgacctctggactaggtaaacaatgaaagcaagcactgtgattaaagccagcaccgccagtgacctggagtcaactacctcacctcaccttctgccactggagcaggagcagggggaagctctggctgctaaagaataagaagggaaacaagtcttctcaggccctgtcttctttaggccctggatctcctgatatccactgatggctttaggcatgtggctctgtaccatcctggacatttttccaggcacagcagacaggtcagcaggaagtaaggaagccagtccctccacaagccaagaagacttcaattggaagggacctggaaatgcatcttactcacatttcttttggtgtttggaggcctccatagtacccccaccacatggccccgcagcctctgaacttctcaggatgggctccccaacaccccaagctacatggcatttttctgaaagccatatcagtaatgtagttgagaatcaaatgaactatgttcgtaaaagtattcttccatcccttctagattgtccccattaaccacagcaagatggttcaagccattaacacacacgatacccatgatcttatagtgccaagtgctgttcttttgcttcttatctcagttgagtggcccctagatagtcaagtcataaatgtgtgtgcccatgaaaacttcttattatcactcactattctagctaattctcaagtgcaatcaatacctcctgtttctcaagtgtgcctaccttcttaatctagctgccattaccctgacccaggccactgtcttctgctgcttagatcatggcaagcacttccttttagatctgcttttctccagtcctgttcccctcaacatcatagccagaacaagccttgcaaaattcaaatgtgatcacctctccactactgcagtccctctagtgccccctggaaggaaacccaaagtctttaacacagtttacaattcttgttatgaggatgaaatttgaagacattgtgctaagtgaaataagccagatacaagggggctattgtatgatttcacatatatgaggtacctaggatagatgaattcagagagacagaaagtaaaacagaagttaccagtggctgtgggtaggggtaaatggagaattctagtttaatgagttgagagtttcagtttgggatgatgaaaatcatcccatgatgtggtgatgatagcacaaccgtgtgaatgtacttaatgctactgagttgtgtgcttaataataatggtcaaaatggtaaattttatgtctattttaccacaatgaaaaactggaaaagtaaagtcaatgactataatatcataaagtgtaagtaacatgagagaaaataattcaggctaagaggatagagactgctaggtaggactattttagaataagtgatcaaggtactgatttctctgaaattggaatatttgaatagaagagaaagagctagctggcgatgcccgtaaggggtccaggcatggagacatcaaatgaagagtctgaggcaggaatggccttaatgcattaatggcagcaagaggtctatgtggtttcatggatgggtgtgtgcgtgcatgcacgtgtctgtgtgtatagttggtgtgcatgagcatgtgtatgcatttgtgagtatctttgtttttctgttggaaacaaggatgtcaacaggactaactaggtgaacctagctgtggtagttcagcaatgagatttgccaaaatggatggcaattgaaagaggaattgtgctgtattaaagcagacagctgccgagcactgtattggaggctcctaaatttctcatagttctgagaagagctgtttattaatctggagttgaaggccaggcccaggatatccttgttcacaaggttgattgggccctacattgctgagcccagcctcctccctcactctgaggcatctgccagagccccaggctagagggccagcgtccttgtcactgagtccctgctctgcagaaacaccagtaagtcatttctggtgaataaatctgggtttccggatcaagggtttggggagctgacatgaccctggaggcatggaggaggctttctaggggtggggggagtgggatggaaagcagaaatcaggttgaggatgtctctttttctgcttgtgctggagcatctgtgactttcctccattatctgttcatctgcagtggagactgtctttgttttcaaagggaaacttggaggcttagacctatggggctaggctgctgaggtttcttagggggcaatagctggaagaaagctctgaagaacaaatgaaaggttaatactgagaaatgggaggaggattcaaggcaagttttctaattgccagtggtttttgactcacagaacatggggaattcctgccagaaagtagagaggtatttagcactctgccagggccaacgtagtaagaaatttccagagaaaatgcttacccaggcaagcctgtctaaaacaccaaggggaagcaaactccagttaattctgggctgggttggtgactaaggttgaggttgatctgaggttgagaccttcctctttggatcaccagctttcagctcagggcctgccamtgagtaaatgatagttaacaggtcctggaggggaatcagctgcccagatacaaagatgggattcaggtggcagatggacccgaagaggacatggagagaaagaggaagctcctacagacacctgggtttccactcattctcattccctaagctaacaggcataagccagctggcaatgcacggtcccatttgttctcactgccacggaaagcatgtttatagtcttccagcagcaacgccaggtgtctaggcacagatgaacccctccttaggatccccactgctcatcatagtgcctacctttgttaaagtactagtcacgcagtgtcacaaggaatgtttacttttccaaatccycagctagaggccagggatgggtcatctatttctatatagcctgcacccagattgtaggacagagggcatgctcggtaaatatgtgttcattaactgagattaaccttccctgagttttctcacaccaaggtgaggaccatgtccctgtttccatcactccctctccttctcctgagtatggtggcagcgtcttactcagaaactgtgacctgtgaggatgcccaaaagacctgccctgcagtgattgcctgtagctctccaggcatcaayggcttcccaggcaaagatgggygtgatgrcaccaaggragaaaagggggaaccaggtacgtgttgggctgttctgtctctgcaattctttaccttccagaggaaactgcctggggatatgaggagactgatgtcctatttgagtatatttttctcaactatactrtaactcaaaacagagattcagctctcattctctggcatctcagaattccacacagcagtttgtgactaatagttgtcttgccagcccaggaaagtggcccacaggtcaggccatcccrtgggacacaggatgaatttttcttctctgggtcattgtcatgtcagacccctattcacttcagtagggatggcaccaggttcaagaggccaaagaagagatggagtcagcaaacaaacataggttttactgggggaayctgtttacagggagatccagcagcagtgggctggacaggagaacaacaactactggtaaaaacaaatgcagttaattttcactttgcaccctccctgcagcaacctccacgtggcaactttatttcttaagttattgctctcaggtgcmcaccatacagttattgagagcagtgctcagaaaggtcagtcctgggtcaaggtctccyttctcctgagaagggattgggcatcaaactcttgaagagagagagcaagaacatagatattaagtcacatttcctttgtcttccaacaggccaagggctcagaggcttacagggcccccctggaaagttggggcctccaggaaatccagggccttctgggtcaccaggaccaaagggccaaaaaggagaccctggaaaaagtccgggtaaggaccccagcaaggtctgagctgacttcacccagggttctgagaccttgagtatctggtaagaggtgccccttctcctgttccttcaaaggaagatacccaaatttgctttctgacccagtgccctcagccctctcttcattcttagagccttagggaattcctataagtgcctgagtacagacttacaaacttttcaagacaactccctcatcaggcactccctgtaagagctgagcctggattctccatcagctgaaacagtctaatgtgaggccctggtcctagagggagaaaacaggccatctaagtgtgggcttattatacctatttttacaaaagcatgtaaccatggtatgycatattttacttcataagaaaccaagccaaagcttaatagcttaaaaacatagccgtcaatttaaatcacaagtctgtgggtcggccatgtgatttctctgctggtttaagctgggcttacccacatgtctgtggtcaactgatggccaatagtctcactcatgtgtctggctgttgtctgaatgttagctggagtgatgagggtaattgaaccacatctctcatcatccaacagggcttgttcacatagcagtgattacaggattcccaagagtagaaataagataggctttaggcttcttgaagactcagagcacattatcatttctgtcagactgtattggtcaaaacaagtcacaaggccagcccagattcaaggagtggggtaatagactcatgtcttaatgcgaggagctgtaccctattgaggccatttttgccatctactacaacaagtgatttgctcatgccctccccacttggataatgggcaactcacaaaaatcttggtttcctgactaacagaacaaacctggaaaaaacaaaaacaaaacaaaagacatcaaaagcaaaacctctccaaagayaaaaactctgcaatctttttcgtcactcttcaccaggtcataatagagtaacgcctcaagagatttctttttagttttgatagaacaatttatttgaaaaaaaaatctgtgaagaacctggcatatggattgctaggtaatcagggagtatatgygtgcatgtgatatgtatgcgtactttgggatacagtaaacagacaaagagggacatttggggttggayggaaatagcgatttttcattctttgggcttttcagtattttttattttccttcaaagtgtaaacatcaatgtaaaataagctttttttttcagtttgaaaaagatactccactcccttgtatatgcacagttctgaggctccttctcaacaatgcttctttactttgttctaattttctagatggtgatagtagcctggctgcctcagaaagaaaagctctgcaaacagaaatggcacgtatcaaaaagtgtaagctttttctcttactctccaggcagcttgaagtttgggaaaaatagaatgcaacaaatatttgttgaatgcatataattttctgtaccctgctaggcatttctcatattcttacctcatgaaattctcacaacattttggtagaaatggaggcaaagggaagttaaattacttgttcaaatgcacagagctaataaatggcaggggtggtttatagatggaagtcagtctgactcgagagaccctaatcctttaccgtctgatattgctcactgaaaatgggacttatatccctttgttgcactggtattgagacctggccgtggggtctaacctgcctggggcaaatattttcagacattttttgtttggtctcaagttaacaatttagaattcagaagtccaaattatatgtcttttagaattctgatctgaaagcacagagaggcctttgtaccagtctgtctgttcacatttgggttgccatatttaacaaataaaaagacaaagcaccagttaaattggatttcagctgaaaaacatttttagtataagtgtgtctgaaaaattatatgggagatatactaaaatattcattgtttgtctgaaattcaaatttaactggacatactatattttatccggcaactstactctagaagactttttcttgagaaataccttgagttgggcttaaggatgagtsagtttcacccactttttcacattttagggctsaccttctctctgggcaaacaagttgggaacaagttcttcctgaccaatggtgaaataatgacctttgaaaaagtgaaggccttgtgtgtcaagttccaggcctctgtggccacccccaggaatgctgcagagaatggagccattcagaatctcatcaaggaggaagccttcctgggcatcactgatgagaagacagaagggcagtttgtggatctgacaggaaatagactgacctacacaaactggaacgagggtgaacccaacaatgctggttctgatgaagattgtgtattgctactgaaaaatggccagtggaatgacgtcccctgctccacctcccatctggccgtctgtgagttccctatctgaagggtcatatcactcaggccctccttgtctttttactgcaacccacaggcccacagtatgcttgaaaagataaattatatcaatttcctcatatccagtattgttccttttgtgggcaatcactaaaaatgatcactaacagcaccaacaaagcaataatagtagtagtagtagttagcagcagcagtagtagtcatgctaattatataatatttttaatatatactatgaggccctatcttttgcatcctacattaattatctagtttaattaatctgtaatgctttcgatagtgttaacttgctgcagtatgaaaataagacggatttatttttccatttacaacaaacacctgtgctctgttgagccttcctttctgtttgggtagagggctcccctaatgacatcaccacagtttaataccacagctttttaccaagtttcaggtattaagaaaatctattttgtaactttctctatgaactctgttttctttctaatgagatattaaaccatgtaaagaacataaataacaaatctcaagcaaacagcttcacaaattctcacacacatacatacctatatactcactttctagattaagatatgggacatttttgactccctagaagccccgttataactcctcctagtactaactcctaggaaaatactattctgacctccatgactgcacagtaatttcgtctgtttataaacattgtatagttggaatcatattgtgtgtaatgttgtatgtcttgyttactcagaattaagtctgtgagattcattcatgtcatgtgtacaaaagtttcatccttttcattgccatgtagggttcccttatattaatattcctcagttcatccattctattgttaataggcacttaagtggcttccaatttttggccatgaggaagagaacccacgaacattcctggacttgtcttttggtggacatggtgcactaatttcactacctatccaggagtggaactggtagaggatgaggaaagcatgtattcagctttagtagatattaccagttttcctaagtgattgtatgaatttatgctcctaccggcaatgtgtggcagtcctagatgctctatgtgcttgtaaaaagtcratgttttcagttctcttgattttcattattcctgtggatgtaaagtgatatttccccatggttttaatctgtatttccccaacatgtaataaggttgaacacttttttatatgcttattgggcacttgggtatcttcttytgtgaagtacccgttcacatttttgtattttgtttaaattagttagccaatatttttcttactgatttttaagttatttttacattctgaatatgtcctttttaatgtgtattacaaatattttgctagtttttgacttgctcctaatgttgaattttgatgaacaaaatttcctaattttgagaaagtcttatttattcatattttctttcaaaattagtgctttttgtgtcatgtttaagaaatttttgcccatcccaaaatcataagatatttttcatgattttgaaaccatgaagagatttttcatgattttgaaatcatgaagatatttttccatttttttctaatagttttattaataaacattctatctattcctggtagaatagatatccacttgagacagcactatrtaggaaagaccatttttcctccactgaactagggtggtgcatttttgtaagttaggtaactgtatgtgtgtgtgtctgtttctgggctgtctattctagtctatttgttgatgcttgtgtcaaacagtacactatcttaattattgtacatttatagttgtaactrtagtccagctttgttcttcttmaagtcaagatttccatataaatattagaaacagyttctcaatttctacaaaatcctgatgaggtttctactgggaccacattgagtctatcaatcaacttatgcagaactggcaacttactactgaatctctaatcaatgttcatcatgtatcgcttcatktaactagratttctttaacttaattgctatgttttgacatttttagtttaaaaaccttgtatatcttgttttggtggttttagtgattttaataatatattttaaatattttttcttttctattgttgtacacagaaatacagttaagttttgtgtgtagtcttacgatgtttagtaamctcaataagtttatttcttaaatctagtaatttgtagattcctctggattttgtatatgcatagtcatgtaagctgaaaatatggcaatacttgcttcttcccaattgctttaccttttttcttaccttattgcactggttagcaaccccaatacagagaccaccagakcaggtatagactcctgaaagacaatataatgaagtgctccagtcaggcctatctaaactggattcacagctctgtcacttaattgctacatgatctagagccagttactttktgtttcagccatgtatttgcagctgagagaaaataatcattcttatttcatgaaaattgtggggatgatgaaataagttaacacctttaaagtgtgtagtaaagtatcaggatactatattttaggtcttaatacacacagttatgccgctagatacatgctttttaatgagataatgtgatattatacataacacatatcgatttttaaaaattaaatcaaccttgctttgatggaataaactccatttagtcacattttatcttgtgtatgtattattggagtggacttgttaatagtttgtttagaacgtttgcacctatgttcatgagagatactagctttttttcccctccttaatgcacttgctatggtttggggtcaatgttatgtaagcctcattaaaatgagctgtgatgtgctctcatgctccttattatctaaaataatttgtgtaaaattatactttaatgttagataaattcaccagtgaagccatcttggaatggtgttttctgttgggaaatgattttaatttcagatttaatttcctcatgatctaaacctattcatgttttctgtcttttgttcggtttcagtgagttatatttttcaatgaatgtgtcaatttcctctgaatatatatgtattggcataaaattgttacaatatctttgtatttcttttcaatataagtaggatctatagcaatgtctatgtatctgttatgattatttgcattttatctttattttattgtatttttttttgagatggagtctcactctgtcacccaggctggagtggctggagtacagtggcacgatcttggctcactgcaatctctgcctcccaggttcaagagattctcctgcctcagcctcccaggtagctgggattacagatgcccaccaccattcctggctaatttttttaattttttgtggagacgaggtttcgccatgctggctaggctggtctcaaacccctgacctgaggtgatctacctgcctcagcctcccaaagtgctgggattacaggcatgagccactgtgcttggcccatctctttttttcttaatcaatcttgcaaaggatttgtccattttattaaatttttccaaaaacttctttttggtgtttactaacctctatgattacatttatttatatctgttcctgtctttatcatttcttgtatcgatcttctgtgggtttaattggccattctttttctagcttcttttaattgacatttagagaactgattttcttccttccttctttgctaatataatcatttaaagttataatttttatttaagaactatttcagctgcataccacaggtttggatatgtatcttttcccaccaattcaaaataggtttttcatatccaattcaaaatattttataattttcattgtgacttcttcgactcatggtttatttataagtgtgtggtttaattcctaaatatttgagtattttaaaaagctatactcctgtaagtgatttatagtttaattccactgtatccagaaatatacttttatatgagttcaatcttttgaaatttgttaagattttattttatgatccaggttatgatttagaatggtaaatgtattatgtgcactagaaataatgtggtttttacagttgattagtgtatcattaggtcaggatatgaatcttctttgtattttctgtattctcactaatattttgcccttttagaaggaaataacaaagatcagaatagaaataaatgacatagagagtagaaaagcaaatagatcaatgaaactcaaaagttaatttttgtgaaatgatacaatttccaaactttagctaaaataactaagaaaaatacagagaagactcaaaatcagaaatgagaggagacacgacaactgataacatacaagtacaaaggatcataagagctacattcctttgtgttacattgttttctctttacattctgattgtctctcgcttgctcgctgtcttcttttaaagttttgtttcagaagaactaaaaaaatctaggtttaaaatgtacagatatcctttgtaacttagcattaggcaaaattgtcttagagaactcaattacttttcaagtaaaaaatgataaattgaatttcatcaaaattaaagattaactcagtttgttaaacattaggaaaacaggcaaaccatgactaggagaaaaatatttgcaaatattggcctgcatctgtcaaaggatacataggatacagaaacaactgctataagccagcaataaaaagacagaactgggaagggatggccagggaccaaaggagaagaaatgaaacacaggatagaccaccttcagtgtccttggtcaggaattcccattccttaatgttgtgggctaaatagtgtcgcaaaaaaaaaaaaaaaaaaaaaaaaatctatgcaagtcctaaccaccaggacttatgaatgcacccttatgtggaattagggtctttacagttataataaagacaaggcgaggccacactggattagagcaggccctaatccactgactggtgtccttctaagaagagggaaatttggacacgcagtcacacaaggagaatgctgtgtgatgaagaaggcagagagtggagtgacacatctttaagacaaagactgccaaagattgtggacaatactggtatcagaaacttctgccaacttcttctgaaacgtctgcctacaaacttgttttctactaaaatcgtccattctatgagaaaacacagaatatgatgaaccattcagccaggaaactgctgctaattcctcagggctgtttacctatgatggcctatatcagaagctaggagtgaggcatagaataatattcctcagagcctccagtaggaaccaaccctagtgacaccttgctctcagacttctagcctccagcactgtgtaagaataaatttatgttgttttaagccacccagtttgtggtagtttattatggaagccctagaaaacaaatacacttggcagtggagactcctgttgtgtatactacagtagactgaattgttccctggaaaacatccttctgagcttcagtcttatgattgggaagacagaaagagagagagagagagagagagaatgaatgaatgaatgaattgagatattttcatgtgctttccaggacctccataaaaagtcactctgcggtctgggctcacatccccactgggggattcatgaggagggagtgggctactgtagtgtgtgtgattcaaaggctgggtcctgctacatttatgagaataatgatggcttcgacgttgacctcacaggaaggtgtctccacagtactgaaggccaatctgggcaaggagctgcaggccaccctcaggcagacaccaggcttttagctaagggtgagggggaacttcggagcccaatgagcccatgtaacccacagcaggactttgtcactgcaaccaaagtgagtagcggggagctggctgggagaggaccaggagtgagctaggtgtgtgtacaggttgggtgccatgtgatttaaatctttacaggagaatcagagtggaacaagaggtgaagaaaaacttgtagaaggggtttctgagtaccttttatgtgccatattttgtacttagaaactttgcaccatgacctcataaaacatcattttacaaaagaggaaaagagaatctaagaggttgggacactcgcagcgagctcacagttcacgtgaggtagctttagaaagttgaaaattcacaactgtctcactcaaaactcatgtcatcaagcatattctccatgtgttaatccatactctaggtcataaattggttcaagcaattcctcttgttcttctctcccagtttctggccagtgttacataacctagctcttcctttcagacttgcctccccttatcatcccacctcaagaggcatcacttagagatgccaaaagaagaaactgctgaggacaggcaaccactttcacatggaaggacagaatgatacataaaacaaagatgatgaggcagtaccatacccttccttacacacacacaagcacacatacaagaaacacccaagagacacacaaaataaacatgtatacagcaaacatacaaacactcatagatgcatagaagccagactctaatcaaaggcctgactgtgatccctctcttctccagctctgatcttgcaggaatccatgatcatggagggaaataggacctttgccagcaacaggcagtcatttggccgcccactgtgaactctgtgtccatgagtccatcaccaccctcatggacctgaagaacacaggcctagtatgtctcatgaggaaagtaacacacctacctgggcctaagggaggccccagtcccaggaaattgcgctacctgaatgagacccctgtaactgtacatttgctacccagaggagcctgatggacaagacagaggaaagtgcgtggagatgaacgggataggaaatggaataacataaactttgtgcagtcctatctcactatgtgagttccacatgcatcaccaggaaagtcaggaagattaatgcttgttccagaaacgggattgctccctcacagcacccttctgggcaccaatatctgaatagtaatggttagtttgggcctaccagtttgccaaattttgtatgaaaactactgttgttagctgaaaggtaacctccaatgatatattcatattctaatctctgggatccgtgaatattactttacagggcaaaatagtgcatactatcttatatgtgatatgattaaattaaggatcttgcaaggaggaattaccctggattatttggttgggctcttttttagccatttcagattgctgtaacaaagtattgtagactgggtgacttataaataacaaatttatttctcacagtcctggaagatggaagtccaagatcagcatgctaccatggccgggttccgatgaggttgtggacctcttccaggttctagacagctgactgctccttgtgctctcacatggtagaaagagactggtagagctctctagagtcacagactccataatggcacaaactcatttagcagagctccaccctcatgacctaatcacctccaaaggccacaacttctaataccatcatattgacagttaggatttcaagataggaatttcgagaggaaacaaacattcagtccattgcaggccctaaataaaatcacatgtatcaagatgggcagggggagtttggagacagatgtccagaagaagaagaggaaggaatgaggaagcagagattggagcaatgcagccacaagcaaagaaacatctgcaaacactgaaggaaggaagaagaaagctgaggctgaaagaggcaagaaagagatcctcccctacagtgtctaaagggagtgtagccctgccaacactttgatttcagacttctggactccagaaattggagcaaatgaatttttgttgttttaatccacctagcttgtgttaatttactacagtcatcctaggaaactaaaacaagtatgcacaggagtttttgctcaggactcatgaaaaactacaggctcctgaaggaggcatgagcctgtcctttggacaatctctatgcagtggccaccacaaatagtagcacccctctcctataaagtgtgtctgcgggttatgaggcaaactccagttgctcctctttcaggatccatgggatcaccttttcctggagaatgaagaatgtcttgaaatcatgagcaccagaattctctcattcctggaggcccttgaaaggctgatccttctctgtgtcctttagtatctttgtcccactcctgtctgctctaagatgtggtcattttgatgctggccccttaaactctgcagctgtggatgtctatgcccaattctgggtctttcataacagcatctttatcaattacatgcactaagggtctgtttcccacccatgtctgcaatcagttgatttcaacctccctcctaccaagagtggcttctcttcctacatttgttaacccaggatctcagtgggtctctctgttcctatccatgatgtggtctgtgtcagaggtctcagctggagagtgccaacgggaagaatgacaggaagtactcatgaatgatgagataacttgtggagtggggctggaaatggatacacacacccgcac

SEQ ID NO: 8782 - DNA, 24474 bp, Homo sapiens
aacgaggagcacaccctgattcaaattttcataactctttcactctaaattgtgtcttttaaacatttgtctcctccaccagattgtgtctttggagcaagaatggtgttgtattcattctgcatcttcagtcactgacacttatatattgtattcattttctattactgcataacaaatttagtaggcttaaaagaatgcagacttatcatctcagtttccatgcatcaggagtccaggcccagcttaggtggatcctgagctcagggtctcatcaggctataatccaggtgtctgccagagctggcatcccatttgaggttcaaggtcctcttccaagctcaggtgattgttggcagaattcatttctttgaggtcctaggactgaggccctccactcctagaggctgcccgcaattccctgccacaaggccctctccacaacatggctgtttgcctcttcaaagccagagagtgtttcttcagctttgaatctccttccttccagggaaggcctgaacccactttttaaaagggctcgcctgattaggtcaggcccacccagacactctcttttgattaactcagagttgactgagtggagatctcattacatcttcaaaatcacttcacttttactatatctgggagtaaaatctcatcctatacacaagtgccagcatactcaagggaagaagattatatagggcatgtatactagggagcagcaatcttggaggccgaccatagataataaacatctgttaaatgtgaatgggtgaacaaataaatgaaagaattgtcctaatgaatgaatcacaaatggcctggtcacagggttatattctaagattcattaccaattccaaactgaaagaaaagtccgtataaataccaccattttaaatgtacacacagattaacacctctcctgaaatttaggaagaggagtggacatattttcaaatatcttgctatgacaaatccaagagattgcagtctgcttaagattcaatgttctacaatgccatgaaatgggtctgcttaagactcaatgttctacaatgccatggaaatgtgcttttgagatagaggtgctcatgggaggttcatgatgatggtcctctcttcctggtgcttggtctgggactgtggcctcaagctccctgggacattaaaacatattttggaaaaggctgacctttgctccagacacctgtgggagcaccattgtctgtgtgggagtggggaggtgcttctttaggacttaagggcaagcaggtcctgagacattcctaagaaaatttgagagtggccaaacacacgcagggttgaaagtatgagtatcactttccaatgcacaacacagctcacatgcactctggcacttactgttgggttaggtctttaatttaaataaatttaaaagacatagaatagtgcaaagtctactgtgacaagcaccaatattcctactgtgagagtcaacaactgccaaaattggaattttattttatttccattaagccattttgttactattaataataaagaaaatattacagatacggtcaaagcctactctaatccttacacaaagtctcattcccttcacactagcaagagtttggagtacatccattggtcaattgtttatagttttatatgttgtatgtgtgagtatatacgtataagcatccataaacaatgtgtaagcacatcttaagtaaagagtattatactgcatgtattaatgcacatacttatatttttagctctagcaaaaaatagatcaaactcataactgtagcaaagtatttcatcacatgaataaactacataatatcgatccttttttttactgatggacattgtaatcatttctacttctttgctgctgaaaataatgttgcactaaacatcttttatatgtctgtcttgatgtatctttttggcacacacacgtgccagtgtttacttagaagtgaatatcggtcctcctaaaagagaaatccctagctcataagagaggagcatgttcattttcactagcagctcctttattagtcctcacgagtccagacgtctgtgcacacttcctctagagcatgagagggccattttcttatagcctcaccaatgcctgatactgtcacactatatcatttttgccaatctgatgaaaaaattataccaacttattttaattaatttgtatttcttattgttatcatctctccctaagtcaactggccatttgcatttcctcttctgtgaaccgattgcctattcaacacctttgttcatttttctgtggacatcaaccatcatcgctgtgaaaaggagctcataaagctcctgacaaaagcatcacatgctagtcagttatccctttcccttccctgaactctagcccttgtctaagttgcagcaacagaaagctaaaaacgcactctgtcaaaaatgcctttgcataactgtggtttcaccacattgctttgtattttagtaacagtccatgggggtgtacatttctgcctttggtcaaactattattgaggacatgatccacagcattattaaaatctctcctaaaacacctacataacaaactcctctcaagtctcaaagatcagactgttatatccattaaagagtgaattccttttgataagagtagttcagtaaatatcttggtaacctcagattgcttcctttagtcactccttttgtctcagaattcatgagctccaggaaacttagagcaaagttttctgcacatctctaaaagactaacttccctagcctaaggtagtattttccagctactctgtgtgtgtgttttccttctttttagggtttgcaggttgttgttttcttttatctttgcacgtttcacacttaacactacatatgctcataggatgtagtagacagcaaagcatatgagtaaacatttggcctttggaaatagaaatcgtatgtttgccacagctctgccacttcccagctatgtggccttggataccctacatgatcttcactttcttaacttgcaaaatgggagtagtagtctctatctcatggtgctgcggtattgttaagttaaatggcccaaaacaggtaaagtgcttaggatagtggctagcaagaagtaagtgctgagtaacgattagctattgctgagtaagcaataaacataccgacgtgcttacatttgtagattcacatagcacctgcccaagctaacttagtaaatatgcatgcaattcttcatcagtgtctaagtggaaagcagatactccactctattcagggccttgtaagactggagcatgtggacacttgggcccatcccctctatagtctgtctagtggtggtgttgagttagaagctactgggctacctgctcccatatacacctattaattgtattcacctgggactttgatgaagtctggtggacaactgggtgactcagagccctctcaggaccttgtgggaagggctctgatcagtggaatctccagagctcagtcattcctccatccccttcagctccaaactgcagcctcagacagactacaaaatagatttctgtcccaggcccctggcaaacactgtgtgggcagctctcaccttccctctgttccaatcatctgctcactctgccctgtgccggcctccggtgataaaataaatgagtgttctgcttgaaggctgccctgacctcaccaatctcctacttccagtttgtcacaggcctcggggacagtttgcttctccaaatattttgtatatccagacgttcccatttcctaggagcaaaatagtgctactatagtcctgcagggggtctactccatccccactttccaccatctgggctaggttattttgatggctacataatattccactaagtggatgttctataactttggttaatatactggtaaataggttacttccagttgcaagattaattttatgcatctttgtgcaggaagagtcactggatcaaagaacaagtagagtaaaattttaatatatgttgttattctgttcccaggaggttgcatacatttgtactctcatccgctgtgtaacaactatttctccataccctcaccaacacagggtataaacaaacttcatgtttgtccatcaataggttttaagaaaagcctctccttgctttaatttttaattccctaacaatgagtgaggttctgcatctttttatagctttgttagccatgtcaattaatttttccacaaagtatctttccatgtctaatgcattctttttgtctatggggttgtctgaaaattgcttaatgatttgtatgagcccttggttcgataagaaaacttatgtgttaaagtgtgtcccgatttttttctcatattatctaactttttatgaaattttgatgtgcttaattttttaatgggattaatttactagtcttttcttttatgggtcctaagagtatttacatgcgttacttccctctctcttcacaagggcatagggaacatttatttgtttgtttgtttatttttattactttttgagacaggatcttgctctgcagcccaggctggagtgcagtggcgcgatcacggttcactgctgcctctgcctcccgggttgaagcgatcctcccacctcagcccccccaagtagctgggattacagccccgcgccaccatgcccggctaatttttgaatttttagtagagacggagtctcgccatgctgctcaggctggtctcgaactcctaggttcaagtgatctcctgcctcagcctcccaaagtgctgggattacaggcgtgagccaccggaccccgccaggaacatttatgatgtatcccatttcaccttggagtaaactgaagctcaaagaataatgagtgaaactgggtttagatcttgagctccctaattccccatccaggtcttcttcacagcctggctgcccttcacatcttccaaaaaggtctttcaagttgtcaatttgtttacactactcttccaaacatttatatcgaaagtttaaaggaaacaataagtacataaaaaagaaagataagaaatagacctcagtattaaccttttcaaatatttagttggtgatagcgcagaagaggggaaaccgaggctgtccttgccattcacgctgtgaagatgcgaccctggctcactccccgcagctccagggcagctggaagcagagaactcccatatctctaataaagccgggcctctcgcagatgtcagcgcattgcattgactcctggacacctgcactaaaggcccttcaggcacctccaactaaatatgcccagaactgaactcaccctatctcttctccatctcaggtaagctgccaggtggccaaggctgggagtcatgatgctttctccttctgaacatccacaatcgggggcagagaccttcaccttccatctcctaaacactctacgatgggtcctcttctcttcacccccactccccgcacccctgccacacacctctcccaccattgcacgcgcccagtctccacgcgcatttcctctcccaccctgcagcagccgccctagcatattacctctaatgcaaatcgcaccactgtcccgcaggctgaaagcctcggtgcactcaggacaagagtccacgcttcttaaacaaacggtcgacgttgtccgcgacctggcccggcccaacgggtcagaccgtcattggccatctcacagtcccggcgctccagagcccctcccacagcgggacatgaaggaggcggatacggctggaccttacccggcccgcccaaggcgtccgggacccgcccaggcgctgacgctaactggagagcctggccccgcggtctccttgtcctgccaatctccgggaggcgggatccgtctgagggcctggaccaattcgggagcgggggcgcggaaagaggcggggctacgagctcctcccagagctccagcctccaggcacccgggatccagcgccgccgctcataacacccgcgaccccgcagctaagcgcagctcccgacgcaatggacccggcgctggcagcccagatgagcgaggctgtggccgagaagatgctccagtaccggcgggacacagcaggctggaagatttgccgggaaggcgtgagtgaggagctgggcgggaaggggtcgcggagacggcttcgtggagcccgggtccccagaagcccccaagcgcctcctctccccgttgttttctgctccccaatcccctggacccgattgagagggattccaatggggattgttttcttctttaaaaaaaagattgggcctgttatgctcacaatgacttcaggtggtaagtatctgttcctttcactcagtgacttgcycaaggtcacctggctgttgaatgctgtttaggactggatgtttctgtgacagtggtaaaagtaaataaattgcatttaaggggtaagcaggtgtttaaaaacaaaacaaaatgaaagaatgtggtcgcagctaaggaggtttttacatgttgtttaaatccagtaaagtctgatccagcatctgatgcatactaaggttttcttctgtgttcattacagcatgaacccctctctttgtcgttgccagagggtagcatgggagtagttttgcttgacccttctgacttttcattacagcatgaacccctctctttgtcgttgccagagggtaacatgggagtagttttgcttgacccttctgacttttcattacagmatgaacccctctctttgtcgttgccagagggtagcatgggagtagttttgcttgacccttctgacttttcattacagcatgaacccctctctttgtcgttgccagagggtagcatgggagtagttttgcttgacccttctgacttttcattaagtagccctgggttgctcaaggaaacagaatgcctggtggcttttaagataattttaaaaaccacccacggctcttggagtcagccagttaagatctttttcttcatcacattctgctgtggggacagctttgcccaagactagtcccagcttttccacgtatgggttgcacagccttggagagtcgtatctcttgaggcctcttacccctcttctgtagaacaggggattaagccaggtgaccagagcccttctagctctaaaattctgtggttctgtgccttttgacagaatggagtttcagtttcctggaggccatctgtggagtttccagggaacctgtaagtgcatgcctcrttcaaagattaccagaggtgccgcacccttcctggtatctttatgggcctgcctcctaaaatattcaaatcaaccctataacctgtgatcacttgtcctccagaaaagccttactgtttttaatgaaatcatttccagcaaactgtattcttgtgaaagcttactgtccatttctgcaggcctgaagggaggcggggctagtgactttcagccccttctctgcaagtctgtcctaaagagtagtgacagacatggcatggtccaccttctagtccttagatacaatctcaagataacragtttgattgatgcgttggggtcaaattccttttcgtgctccaggtaccgaggagaaggcattgtatatgggacactagaggaggtgtgggactgtgtgaagccagctgttggargcctacgagtgaagtgggatgagaatgtgaccggttttgaaattatccaaagcatcactgacgtaagtctttccaagcatgttatctctagatagtgtctgggccaggctatagtaaccccctcccatttcttctggaaggkgtccgtgataccttttgttaagggggtgtgtcctgcaagcacaggctgcccactgcttgcagcattggaggcctgcctcagcccagtttcccggtgggaaacctcatgactcagagagggagagaagccccaaacagagtctctgcggggagcatacctgttccttgtgtggggctgctgcactaggcaacacaggatcctcagcccctggcacccacttccctgaagcctgggccagtagcagctccacrtacctgcatgaccccagttaccctctggtatgagggtcttcacgctttttgcttacatgcttccaacagatttttgagaaattatgcatcatcctcacacatccagttgatgtctattaataacatttagtttacaactaaattttcataagttgcaaagcatgtcatttttgacatgtaaatctcagttttgaacaaagcaatgacatcattcttttagatgtgtctaaataatatataaatttttacttaaaatacatgaacaaggttttttaaatcatcagaaatggtatatagctgttttcctggaactcaaatttccattccacatagccctctgaattttatcctaatacaatacatgtttattcttggaagtcatcatcttgcatcataaatatgcatagaaatagaagtttttttaatcatatatttcatgtaatcatgagactaatttttttttttttttgagacggaatctcactctgtcgctaggctggagtacagtggcgtgatcttggctcactgcagcctctgcctcctgggttcaagtgattctcctgcctcagcctcctaagtagctgggactacaggggcacgccaccatgcccagctaatttttgtatttttggtagagacggagtttcaccatrttggctgggatggtctcgatctcttgacctcatgatccccccacctcgaccccccaaagtgctgggattacaggtgtaagccactgcgcctggccaagactaattgttttttaaaaaattggattgaggtacgagtgtaattcattaaaataacatgattatattataaattctgataaatattaaacgtgacaagtaaaacattttgcgtctttagatgagatgaatgggagctctcttttttctaattaactcataagcccatgaaaagatacaaacttttcaatagacaactgcaaagtagaggggaagcacaggctactggtgagctcaggtttacaaaaaagtggagaattgccaagtggtagctctttatcatttagtgaaacaatgaaaatgtggagaaagggctcttccttgcagactgacatttctcagcatgcttttggcaactctcaaatatcctaattctaaaatagatagatgatcgatgataggtggatggatggataggatacagggccatgccatgagtttgtcgcatttatgacatgtgctgctgctgtcttcaaaatttctttccaaagtcctcctcatcttagtttccagacactgtacctcaggaatgatgcacttggaggcagtcatcaggggtggaagcagtatgatttttttttcaaaattttcatcacttctgccattactgttacaaaataccagaatttagaaatggcaaaattgcctagtttttaacaccaagttttggaatatgcttaagaaagggaaaaacatgaaattctaataccagtgtgtactgccttgattacatattgccgcccgcactcctaattgtccctttgccaccctggaggattttacacactgggacaattcatgataggatgattctagatgaatgggcatatgctgtgcttttcttcaagtgggaaaggagaccctgtgtgcaggtgcagcctgttcccaggcaggtcattaggggatgaaggaaacacggagtagttcctggaaatttattctcattgcacccattgcaaagtgctcaagtgcccccatgcatctcatgccattcgaagattaatttcctgaggccgaaagtgtccctgatgaaaagttctgcagcaacacacgatgccccaagtcttaatacctgaggggaaagacacagagatggagacctttaccagcccctctcacctaccccgagacttctctccaggactgttccatcacaggcctggcctgtacttctccaytgtgacctcgagagagcctgggccccactctcttgcaggatgggatgaatgggagaaagcccagcatccttggtttataaaatgagagtgtggactactgggatatgctgagattgagtgaggttcaaggtattccctcctggggctgggactagggtaaaccaaagagttgccccaggcacaacataggaggctgagcaagtgcagggtcagccctaaaaaagagtggcctctcttccctctccctagctctggccctgttcaaatcctatctccaccatgagcttcgtgctgagttccttagtctctctaagtgtcagtttcctcacctgtaggagggattaatgattcctatttctaaaggtaagggacarctgagagctttgtccagccaggctcttactaggtsctcaataaatggtacctcttatggtcacatgagacgtgacctcagcatggcactggtctgcagctagacagctgtgggcagccygtgtcacagccctcgwcttacaaactgggtgtatttccatgacacccagttcctgggaagactcgctctggatcttaactgtttatagtgccaccctactgtcagccctagtacctttcccagaccttgagggatrgggtgggagttgggagaagatgtctggccagcagtcacagctacatgcttctttggtttggcagaccctgtgtgtaagcagaacctccactccctccgctgccatgaagctcatttctcccagagattttgtggacttggtgctagtcaagagatatgaggatgggaccatcagttccaacggtgagtgatgcccggaggagctgccatgccttcctgcratatygagctttctcttctgcaccccacagttccttaaggaaagccaagcaaccagaaatcaccagaaactcacactctgagtcccctacctcatctggttgggtttggggggactcagggccatgggggtctgacgcaagacagtccatatgccagtaattctatgttcaagtcacggttttgccagtgccccttttttttttttcctgcggaagctcatggtgtgtgctgtacacatgtgggttagttgggtggcaaaaaacttgtgtgcaaaatctatggccgtgtcttcttgagggtttggatgctgtccactcccttaatgcccagtgaggagcagggctcctgcctctgcacagcccctgccattcctccaattcttctacgtgggagagttggatgcatccatgcctctcctggctgagatttgagagaggcacctgcctcctcccatgaccaaaccttgtgttctagaatgttcttttctctgatattcttgacaagcttgggaaagctatgtgcatgtttatgtgtgaatgtggatgagtgagtgtgtgtgagtgcaagtgtgtgtgtgtctgtgtgtgagtttgtgtacacgcatgtgagagtgtatttgtatgtgtgagtgtaaggggcagtagggtgggagtagggggaactcacgccaagaggcaggagtcsctcacagactccagggctgcaggtagtctggtctgtgtgctctatggcaccccartggcagtgacctgaccgtctgaagttgtaactcaccgagattctgcactgtcttccagccacccatgtggagcatccgttatgtcccccgaagccaggttttgtgagaggatttaaccatccttktggttgcttctgtgaacctcttccagggtaaggataatttcctgcattgaggtacatggctcagacctaactgtgacttccctgtggaccttctgtgaaaaggggcactttgactacgattcaaaagaagaaaaatgccttatagctctttagattgtgacgatacaaaatactttcacacacakctgcataagcagaacctcctgagagtacctggcatgtgggaaagaattgaggggaggcgttactcttatttttgatgcaggaaattttccctgcagcctccaggttaagcaaatgtcatggtccatttagcaaatgaggaaactgaggtttggggaggttcagtgatgtgtcctgactcaaaggctaggaggttggcagggcaggktctgtgctccgagtcctccctgaataccctccgccaggcaggagcagctttgaggatagcagtccccaccccacatttcactcagtgatcatctctcctcggcaaggaatgtggcggaactcaggcctaaagggcagttctgagaccacactgtaagtcagcctcagaattgaccccggggactctctgttcccattttgccacaggtcatggccaggctcttgccaggaaatttctgtgtaatgaattacctgaaggtcccttgtttaccctgggaatcatgcatgttgacagcaaaagaaactgtgccttgcaggtgtgtcccggtgttccctgcagtctccatacagacacccggagggaaggggtctgtccttctaccacattgtcccaggaggtgggcctcggtgtcgtgggattataccaagcccagacctagcacctttatgttaccctctttgctaagctggcttttcagacatcatgtgaagacttttcttagatgtaacaaaattttgagtttgaaaatagcacagctgtgctctaccacacacagacatacacacctgcactcagtttcagttctcccaatatataggtgccctggatcccctggcctgggctcatttccttgtcctctcccacctggtagtcagatgctaagactcacctttcagtggtgccrggtctgacagagaggaattttcagaataagaggcagagtccttccttctgaggggctgaatcccattgctgtcttctttttggtggaatgcacaatataatgggtagcatcacgccctcatgccaggtagcaaaggtatcacatggattttttttttttttttttgagacggagtttggctgtcacccaggccggagtgcagtggtgcaatcttggctcactgcaacctctgcctcccaggctcaagcgattctcctgcctcagcctcccgagtagctgggattacaggtgcctgccaccatgcctggctaatttttgtatttttagtagagccggggtttcaccatgttgtccaggctggtcttgaactcctgacctcaaatgatccccgtcttggcctcccaaagtgctgtgattacaggcgtgagtcaccrcgcctggcccgattgcatggattttgctgagagggtggttggggtcccacaaaaccctgcccatatgaaggttttaactcaagtgttgactcttccaactcctctccacttgattaaaaacatcacgtgttctctgtaaagctttcttccagagcctgctgtgtgcagttattctcatgaggctgtggatctgaaatctgtgacaatgattattctcttattattctgtgaagataggcctattctggaccctagattcagcagacaataataacagcagcagcagcagcaaacatttatacagcattactgtgtgtcagccactattgtaagcacttcatataaattaactgtttttataacaaccgtaaggcactgttgtgatcctcatttttaaaataagaatggtgggtgcacagagaggtttagtaactaacccaaggtcacacagccagcaagtaagagagccacagtctcattctggccatctggctccagaatctgggctcttaacccagatattgatgtctcaaaacagctagagtgtctgccctcttagaacttagattccaatgaaggcaggaggagacagacaaaacacaaatgtaagtagttctatctcgtggatgtgctagtaagtatcagacgttaagtgccttggggaaaactaaacccagataaaggtgccagggaaaggtgtgagtgggttatctagggggtttccctaataagacgtttgagcaaggcacaaatgcagggagtcttgggcgtgttggtggagcgagcattctggcagggggatgagcagatgcaaagtcccagaagtgggagcaggagccggagcaagagcggggcctttgaggaacagcacagagggaggtgttgtgttagcaagaggagaggctaggacattcrgcccatgaggtagcaggggccgcagcctgttggggactttcctctgaataaaatgggaagccactggggaggcctgagcaggacatggtctgactttggtcttaactgctatgatgccctgcttccccaaagagggtgaactccaggggacagggacttccttccatctcaaagccttagcatcgtctgcactccaccctctccctcacccaccaacccctgcccatcccgcctttgctagggccttctctctcctcttgctctcttgagtaagaggctgtgagcaagagggcaagaggactcattgggggtgaggtggtgttgaggccagaggtggtggtggttgagctccaagtggcgcggggggcgggggaaaggtgttcttaaggtggaggagcctgtatctgtggtcgaggcagcattacagtgtcatttctggagcacttgcactgtgcacaggaaggatgctaagtgcgtcacacctactctcattaaatccttctagcaaccgtagtggatgccttcatcccagccttttctgaggggagactgggtgacctacaattcctctgtgcccccttttgccctttctgttgttgtcacataatggtgtacatgcaagagctaccactcaccaaggccactgtgacgaagagagtttgtcccatcccacatggcctctcacacgttccgcccaccacaaagcccattcctcacccagagggaaacatgatcacggagtctcatttctcactcacctgttcatgtttccaaagaggatgctgctgagaggtgatgcgggccagaggaagcccattgggaggaggagcagggaggagagagaaggcyctagcagaggcgggatgggcaggggttggtgggtgagggaaaggtggagtgcggatgatgctaggactttgagatggaaggaagtctctgtcccctggagttcaccctctttggggaagcagggcacaagcagaggagaaaagccacagcccagaggagcacatgctctcccaccttgtggatctgctggccccatcctgttccatgccccagttgtccttctgtatgacttgaagagtgagattctttttttttktttttttttttttcttttttgaggtggggttttgctcttgtcacccaggctggagtgcaatggtgtaatctcggctcactgcaacctccgcctcccaggttcaagcgattctcctgcctcagcctcctgagtagctgggattataggcacctgccactatgcctggctaacttttgtatgtttagtagagatggggtttccccttgttgtccagattggtctcgaactcctgacctcaggtgatccacctgcctcgacctcccaaaggtgctgggattacaggcatgagccaccgtgcttggccctggggagtgggattctaaaaggtctccagttccaaacctgtagcctgcatgatgtcaggaaacatctgatgggcaggcatagtgctacctggggttcctggtgaggctgagtggacagttgcattcaagtaaaatgccaaatgcacaccacaaagcctataccacctttgttgtcctggccgttgagaagtttgtcacagtgaagatcgcttcctgtccctaccaagttgtgttccatctccacatcgtgtgcccctttgattctggacttccagtcagcatctgtgccacctgccgtcctctgagcttctgccaccccttggccaaaatcccttcataggtgctcaaattattcgccagttctctaaatagcagttctcaaaattttggcataaggcattattatacccttacatatatttgagggcttcatagggcctttgttcttgggggttatagctatcattatttgatgtatttgaaattgtaactggtaaatttgagaaatgttaaaaatattttaacataaaaatgcactgcatgttaacatagataacatttttattttaaaaaactatttttttaaaacaaaaaatactgtgaaaagagtggcattgtttttatatttttgcccatctctttcatgccaggcttaacagaaactcatacctgcttgtgcgtgtagtctgttgcaatatcacatatcatgtaacctccggaaaaccccactgtatgcatgtgagagaaggcgaatcacatgttcgtgttgttataaaaatagtgttaactttgtagaccccttgaaagggtcccaggagcccccaggaggttgcagaccctaaatagtgaagggcagcatctcttcgttcctctcagggcctggcacaaagtgagttctctgaaagcatttgctgagtgaatcgggcagcagggtactgggtttttgggctgggagtagggacttcttcctccctggaggccgggagaggctgtggaatgcatccccgacaggatgggtttccatcctgaaaatcagcaggtccagagaggactcctgggtggagggcacagcaagggatgagacgcgatcactgtatcatggccatttccactgggctgggctctgctcacctgcctggcgctcgtccccagcacctctgctgcagatcataacacagctctgctgttgccttcacagggaacccaccaagaccaacctggtcacattcttccataccgacctcagcggttacctcccacagaacgtggtggactccttcttcccccgcagcatgacccggttttatgccaaccttcagaaagcagtgaagcaattccatgagtaatgctatcgttacttcttggcaaagaactcccgtgactcatcgaggagctccagctgttgggacaccaaggagcctgggagcacgcagaggcctgtgttcactctttggaacaagctgatggactgcgcatctctgagaatgccaaccagaggcggcagcccacccttcctgcctcctgccccactcagggttggcrtgtgatgagccattcatgtgttccaaactccatctgcctgttacccaaacacgcctctcctggcagggtagacccaggcctctaaccatctgacagagactcggcctggacaccatgcgatgcactctggcaccaaggctttatgtgcccatcactctcagagaccacgtttccctgactgtcatagagaatcatcatcgccactgaaaaccaggccctgttgccttttaagcatgtaccgctccctcagtcctgtgctgcagccccccaaatatatttttctgatatagaccttgtatatrgctttaatgccgcaaaatatttatttttccttaaaaaaggtgtcaacttggaaataatggtttaaaaacaggataagcattaaggaaaaacactttcaatgtgtcttccatttgatgaatttgtttttctctctttatccccgcaaggtggagtttcatgtcctcggtgaaaccagacagtgtgaatctgttccagcccaaatctgcagcattagggatgagttctcrgaagtgattctgaactgagcacgcactcatgtctgcatggggaactctggggagaagagccttccttttctttcccttgggcatttgcctttccttgtcgtcttactgaggcggaggcaggaggtctctgtcttccaggccctggccaggccatcctgccatcaggaaagatggaagagtaggcctccgtctagcagccctggctggaaatcccccctctagatcctgctgcaagactgtacaaactcacaggggccatgtccacccaggcacatcatcagaaccagggagcacagccttgccacctagaaggggcctcagcagccgtgcaactttctttccctatctccaatccagagagggatcctctaacattctctagcaacctcatctgcacccccaccaccttccttgtaagaaagaccacgtgtgactaaaatcccttcacgctgcatttacccaggttactattgtgcgcgcarratgttttcacagtgttctcagcctttgctcctccaaacagaaaaygtttcccctgcgttactgttacttccctatttttgagtcctggggtgactgtctcttaaatgtgccaagatgtgagcaagctttaaaacatgacagctcagtgttaaggagacagaaagcttcctctttctctgttctattgcaactacaaattctacagtcatgcctaagatcctttagctaacacccttttcaagaaatcatcagactcytggattgacttagaattcattcattcrttaagtgcttaccgagtcccygctctgtggcaagcactgttctatatcaacttctcatgagttcagccaattctaggtgcaccagccaaggaaacttcatgcctgccctctctgagctccatactctgaggtggtggtcttatcaagatgggatcgccttgtacatccctgtgtagccaagtggaaggccagccaaccaagaatgcatctcactgggcctatgggacatactgtgcctgcactgctcctccacgtgactgcatcaggttaaactggtcagagccctggatgaggagctggaaaacatgcatccagtccaagctctgccacttgggccaagtgtgctcttgaacagtcacttaatatatctgctttgatttgtcttttaaagaaaatatggaggcaggaataccagtgtcagtgtagcctgcttcttgagtgttggcacaagtgagataatgtatgaatcagtaaaatgctgggcaaagcaaagaagtagggctgcctgggagtggattcctttttatggtgagttaagacgacttcacaattgttagctgtgatgcctgcagtgtttgaggatggcattgccttcatcctgtgtcagctctgaagaagttggcagagcaaagctaagcctcaagtgtaaatcccagcatcatggaacgcaaatggatgagcttttgttttaggatcttcttgctgattcctacccagaggacttccccagcctagagaccagaaacctgggcaatagttatatcttcagtggccctaggagttgttgtgtctccttggggaggagagaaccttctaaaacaggccagagacaggaggtactgggagggccatgggctcacctgcatctatgcccagataacctgggacagataacctctgtcccaatcacttgctttgcctggtctctcaaggagtctcttggtaccccaggcccacggccagctccatgctcatccctgtccccaccttccagtcttgatgaaaacccaccttctctttcatcccttggctgcttgataagacttaaaacaattccctgattttagggaaggccactgcgtgcacagatggtgagtttgtgcaggcaaggaatgtgccctccacatcacgtggcctccttgcccagcctgggtcatgggaagggagtgttgaattgaatcacgtctttcgttggtagattatgttcatcttcaatgtttctattaagtctaaaaagtggatacaaatggtgcctccaagttcttgtctaattgcttgtctactgcttgacaaaatccagaatggaataggccaaacaagttaaccagcaggacagaaactgctctaagcccattattccttgagatgaatagaacagtgagctgaacgcctgctctaatgaagccactaaaggggtttacaggaaggttaggagcccagatgggttttgagtccactgctgggaaacagattcttcacttcctgtggaccctggagaagccatcagattacattaacatggctccactgatgatggcctgagaattactattgtttgtgtttcatctgtgtccttgccaggtcttcccccacatccttacttcacaggatcaggggctgagaggagaccaatactctggcccaggcctggtcaagggatgctggttgttgctgatgcaaagtcacattgcctggtcctgagcttggcaatcaggcatccagagatggccaaaccaaatatccctttggccaggcactcaggcattccctgtaatgttgtgcacttaaagcatcttgggctgatagtctccaccgaatcacagaagaaaactcaatctgccgcatcactcaccagctggataagccatttactgtacacagtgtgtgccctcttatcaatacattggcacagaaccatacaccgtagaagctgctgtgatcactaaaggcaatgcccgtttagccctgagcacagtgcttggcatgtggtaggtaagtagtagcaattttatttgataccctcatatacacgctggttccttctgtcggcacacctgtccacgctttgagcttggtgcttcacctgtactcctctgtttactggctccaccacccttccctaggattacttctccaatccaaccaaaaacaattttgcaaatgtttcatgtgacaaactgtatttttcataaatgaccccagcaatatttcctctccccttaaacccaggcaggtttgtgtcagctctaactgatggagtatggtggaggtgatgccatgcaacttccaaggcaaaggtataaacaagatgcagcttctacatggctcttgcgatcctgggatgctcatcctgggaatccagacaccatgttgtgaggaggcccaggccacaaggagaggccacctataagcattcaggccagcagccccaggtgagttcccagccaacatcaacggccagatgtatgagtgaatgatctcacgtggtcccagcctttgcatgactttgcatgacgccagctgatgccaagtgggacagagatgagctgcccattccaatctctgcccacattgcagattcatgagaaaaataaatgtcactgtttgggggtgaatcatgacacagttacagtacttgaaacattttgcgaagccaggcatgaatgtcatatgaaattctaataaatccattttatttgtggcaccacaatattatcattaagctctctttttacacagtctgcaatttgtatcagctgcccccgtgtgactctgcccttattttaggaacaaccttttgctgggtggcgtcctagaaggtctgggcctgggcagcagccactgggaagcccacctgtgctttcccccatctgggtggggcggcagcagagaccctgagaatcagcggttatgggagctgtgtgttagctgtgtgttattggctttggcttcagcatgtcctgcctaggagtctccagcagctgtggtttccttggactggaggctttttctcctgatgacaatcgtgacaggtccatcaggcagtgccttgatgatgttccaggcttcaaaccgtgtgaggccctgcatggcagtgccacccagctgcaagatttcatctccaggctggactgtctcactttgttctgaggctgctcctgaaatgagggagaaggtaatgggttccacagatgatggggaacaaggaaagttgcctcctctccttgatctccaaagagccaggatagcttggtagagaacagggcaccatcccttgggagcttgcttgttggtggttctaaaatgaggcatctcttaagatggtgactcagaggttagggcaccaggctccagctctccatggcctttggaaagggatagcccttgctgtccccaggggagggaaatatcaggcagctccacgccttagcctgcctggagcaccgtccatagttcatagaggactctggggagctgagtcctgcccagaccctgctttggacactgacccaatatcctactcccttcacatttgttctccgcatgtggtgaggacatcagcattgggtggtatgggaagagagctagtgagatttttgtgcaacaatatttacagggatcttgcctctggcacgaagtcctctgtgtccacataaaaaaggaaacaaccatatatggcccccactatttcaaagctgcaagtgaaaacaatgctattttactgtttatattaaaataaaatttcccatccatttgacacagtgatcttcacaaatcctgataagagtagaagataatactaatgatagtaatgaaaatatagctaaagtgtattgggcaattattttaacaggcgttgtgctaatgttttgcatttatgacagtaatcctatgaggggtgtattatttgtgtttccttttaacagctgaggaaaccaagaactcaagtaactggcccagagcttcatagctgctagtggtgggccctgggctggaacccagactttctggctccagaatctgcatctctccttccaacatcaccctgcagctggcagtctcatcctaaacatttaagcaaatgggcccatggtggtgaagtgacttgtccaagatcatgctaccaaggtcatgtggcagaactaacactggaatctagtcctcttgacattgaacccaatgctccttccaaattgaccttcaaaaattagaaatatctttcccagaattggggttaacatggattctggggggaatgccatgtaagcctcactctaccttctgggtttctgcagccgcagcagaacttcctctaacgaaaccagtcagcagcaggagctcatagtgggtgagggacagagctaagagtccctttgggtctcagtcctaagagccctcagacacacacctgtacctctttacctccttttatggatgaagagcctcaggcccagaagggaagggtcactcagcacattacaggcagagctgggactagaacctggcccacctgcctccctgtccagtactcctctctctacaaccccttgctctgtggcttggagacctccaatttgaggaacaccaaagaatcagggatggttttacatggtagccacagtcattcatgattttcacagggaaatccaagtgacccccatatcagactggtttgtactccaatccctgatgaacaaaatatctatcaacattttaaataaaggcaggagctgacgtgtccaggactagggtaaggcaaatgaggccaagtgtgcagtacaaagtcagactctgtcttgatttaaacttggatattttgtccaacatgtttttttaaaattaattttaaaaaacacgctgcattaaaatagtatcgatctgagttactgagtgttttggcacccctttaaaattctgccccacaggccagtgcctcactgccccactctagagtcctggccctgccaacccgaaccaagcccaggacttaggtatttttgaagacccatcaaaacagaggggggattgaggggatgtctgagcaaaggagaaaaagtagaaaaagcagaattgagccctaaaaggaccagcatgcctatgaagaggacatggagttgtgggaaacaacatagcccagaaagtgcccagaagccttttgggggcctggccacatgcccacaactggagagcacgcaaagaaccagacacaccccacacctttgaaaatcctgttaatggtgagaggcttgtctccgtgtagggagcccttccctccttccaggctgaagcccagccctgccgacatcttctccagtgtcaccgtgcagactgtggcctctgctgctgagaaaaacacaaggtctctgttagggatcctctcctctcccaggccacagatgccctgggcttcaagtgagcccggggtgatacagcccccgtgtttgcacacaggcacatgtaaacacgtctcaggcagtgtactaggcagccacacattcttggggtcacaaattactgagtagccccatcaggtctggccccaaatggccaaagaggatgtggcccatgtggcttccactgagttgggagaacttactagattctacagaaacatcactggctgcagaggctgaggctgcagagtcagtggaggagttgaggtcgggcatggcctctggagtcagcttccttgtgacaatcacagcttgcctgggctctcgagcttggcggaggatggccaaggcatcatggtgcgtggtccccttgagagacttgccgttgatggaaagaacctcattgcccttctgaatagtcccttcctgggaggccagcccatttggaaacactctgtgaacctgagcaaaccaaaggaagtcaggaccagaaatcacacaagtccagtccacatacttgctggaggaggattgaaccggttagtcaatgctagaggatttttaggccaacaaagattaaagataattgtgtcctagattggagctgctggcacagaggccagcattccctccttctccatccagagcagagatcaccag

SEQ ID NO: 8783 - DNA, 23393 bp, Homo sapiens
  misc_feature (1)...(23393): n = A,T,C or G, or insertion/deletion polymorphism (see Tables 1-2)
tccaccacccaccccaccacaccgcctctttctctcacaccgaatagcattcaagaatttccactgtgggctgggcgcaggggctagtgcctgtaatcccagcactttaggaggccgaggtgggcgaatcacctgaggtcaggagttcaagaccagcctggccaacatggcaaaaccctgtctctactaaaaatacaaaaattagccaggcgtggtggctggcgcctgtaatcctagatacgtgggaggctgagttaggagaatctcttgaatccgggaggcagaggttgcagtgagctgagattgtgcccctgcactccagcctgggtgacaaagccagactccatctcaaagaaaaaaaaaaaaattccactgtatgtgtgcagcaaaccatcatgacacacatttacctgtgtaacaaacctgcacatcctacacatataccctggaacttaaagtaaaagttgggggggggggtaaaaaagaatttccaccgtgacattattgagtatagcaaaaaaaaaaaaaacaagaaacagcctagtgttcattagggaataaacgcattcaagcagcatcaaaccctgcagccattacaaagagatctatgttgaccatgtggaatatctccaagagccacagtagcctcccttatctgtaggattcactccaagaccctctgaaaccatggataatactgaaccctatatacactatgttttttcttgtatatacatacctacgataaagtttaatttataaattggcaaagggtatataaatattccttctaagagattaacaataactaataaagtagaacgattaaaacaatatactgtgatcaaagttatgtgaagccaggtgctgtggctcatgcctgtaatcccagcactttgggaggctgagacaggtggatcacctgaggtcaggagttggagaccagcctggccaacatgacaaaaccccgtctctactaaagataaaaaaaattagccgggcatggtgacacatgcctgtaatcccagctacttgggaggctgaggcaggagaatcgcttgaacctgggaggcggaggttgcagtgagctaagatcacaccattgcactccagcctgggcaacaagagtgaaactctgtctcaaaacaaaacaaaacaaaacnnnnnnnnnnnnnnnnnnnnnnnnnnnnnnnnnnnnnnnnnnnnnnnnnnnnnnnnnnnnnnnnnnnnnnnnnnnnnnnnnnnnnnnnnnnnnnnnnnnnnnnnnnnnnnnnnnnnnnnnnnnnnnnnnnnnnnnnnnnnnnnacttcatctcaaaaaaaaaaaaagaaaaaagaagtccagaaacccgcggagacactatcacactatcccccccaggctggtagtgcagtggcccaatcatggctcactgcagcctcgacctcccaggatcaagtgatccttccacctcagcctcccgagtagctggaagtataggtgcacgcccgactgattttttttttttttttttagacggagtctcactcttgttgctctggctggagtgcaatggcaggatctcggctcactgcaacctctgcctcttagattcaagcgattctcgtgcctcagcctcccgagtagctgggattacaggtgcccaccaccatgcccggataattttttgtatttttaatagagacagggtttcaccatattggtcaggctggtctcaaactcctgacctcaggtgatccacctgcctcagcctcccaaactgctgggattacaggcgtgagccaccgggcatggcctttcctggctaattttttaaatttttgatagagatggggtctcagtgttgcccaggctgatcttgaactcctagattcaagtgatcctccctccttggtctcccaaagtgctgagattacaggcgtgagccaccgccccgggctggaaaatacttttttaaacgagggcaatgtgaatctgaaatgccatttgaggaaagatctgttcgcctgacatcctgtttgagcctgggtggacaggacagcacctgccagcatcgggaagcactgcagatgggaagaggcttggtcactctccaaaggtggcaggagttggagggggtgagctgaaggtaaggagaaaggaggtggggacccaggagacaggggctgcgcagcgggctcggggctgacacccccacggatacagttcactggggctcaaacataaaaggaacccaactattgtgggaggaaaagactcttctgcctttctgccttttctttttttctttttctttctttctttttttttttttttttttgagacagagtcttgctctatcgcccaggctggagtgcagtggcgtgatctcggctcactgcaagctctgcctcccgggatcacgccattctcctgcctcaacctcccgagcagctgggactacaggcgcctgccaccacacccggctatttttttgtattttttagtagagatggggtttcaccatgttagccaggacggtctcgatctcctgaccttgtgatccgcccgcctcggcctcccaaagtgctgggattacaggcgtgagccaccgcgcctggctcttttttctttctttttttttttccgagacagagtttcactcttgttgcccaggctggagtgcagtggcgcgatcttggctcactgcaacctccacctccagggttcaagcgattctcctgcctcagcctcctgagtagctgggactgcaggcgcgcaccaccacgcctggctaatttttgtatttttagtagagacagggtttcaccatattggccaggctggtctcgaactcctgaccttgtgatctgcccacctcagcctcccaaagtcctgggattacaggcgtgagccaccgtgcccagcctgacccctctgccctttcaaaaactatgttcgttctctcacagccttctcttgtcatattaagtccacaccgcaggcctaatttgtccagtgaatgctatgcaaatatttcatgcacctgctgatcgcaggaatgatatgtacttggtacgcactgatcgtacctcggggtgggagaagagagggcaaggaagcaaagaatagccccctcctttcctggtgcaccttcagatgtgccgatggggcccaggctcgctgcagatggcccccttcccagagacaggggaggatcctccacccactccccagcctccaggaccatcctgactcctgccttcaggcactcaagttatgcgtctagacatgcggatatattcaagctgggcacagcacagcagccccaccccaggcagcttgaaatcagagctggggtccaaagggaccacaccccgagggactgtgtgggggtcggggcacacaggccactgcttccccccgtctttctcagccattcctgaagtcagcctcactctgcttctcagggatttcaaatgtgcagagactctggcacttttgtagaagccccttctggtcctaacttacacctggatgctgtggggctgcagctgctgctcgggctcgggaggatgctgggggcccggtgcccatgagcttttgaagctcctggaactcggttttgagggtgttcaggtccaggtggacacctgggctgtccttgtccatgcatttgatgacattgtgtgcagaagtgaaaaggagttaggccgggcatgctggcttatgcctgtaatcccagcactttgggaggctgaggcgggtggatcacgaggtcaggagttcaataccagcctggccaagatggtgaaaccccgtctctactaaaaatacaaaaaaattagccgggcatggtggcgggcgcatgtaatcccagctactgggggggctgaggcagagaattgctggaacccaggagatggaggttgcagtgagccaagattgtgccactgcactgcactccagcctggcgacagagcaagactctgtctcaaaaaaaaaaaaaaaaagtgaaaaggagttgttcctttcctccctcctgagggcaggcaactgctgcggttgccagtggaggtggtgcgtccttggtctgtgcctgggggccaccccagcagaggccatggtggtgccagggcccggttagcgagccaatcagcaggacccaggggcgacctgccaaagtcaactggatttgataactgcagcgaagttaagtttcctgattttgatgattgtgttgtggttgtgtaagagaatgaagtatttcggggtagtatggtaatgccttcaacttacaaacggttcaggtaaaccacccatatacatacatatacatgcatgtgatatatacacatacagggatgtgtgtgtgttcacatatatgaggggagagagactaggggagagaaagtaggttggggagagggagagagaaaggaaaacaggagacagcgagagagcggggagtagagagagggaaggggtaagagagggagaggaggagagaaagggaggaagaagcagagagtgaatgttaaaggaaataggcaaaacataaacagaaaatctgggtgaagggtatatgagtattctttgtactattcttgcaattatcttttatttaaattgacatcgggccgggcgcagtggctcacatctgtaatcccagcactttgggaggccgaggcaggcagatcacttgaggtcaggagtttgagaccagcctggcaaacatggtgaaaccccatctctactaaaaatacaaaaattagcctggtgtggtggtgcatgcctttaatctcagctactcgggaggctgaggcaggagaatcgcttgaacccgtggcggggaggaggttgcagtgagctgagatcatgccactgcactccagcctgggcgatagagcgagactcagtttcaaataaataaataaacatcaaaataaaaagttactgtattaaagaatgggggcggggtgggaggggtggggagaggttgcaaaaataaataaataaataaataaaccccaaaatgaaaaagacagtggaggcaccaggcctgcgtggggctggagggctaataaggccaggcctcttatctctggccatagaaccagagaagtgagtggatgtgatgcccagctccagaagtgactccagaacaccctgttccaaagcagaggacacactgattttttttttaataggctgcaggacttactgttggtgggacgccctgctttgcgaagggaaaggaggagtttgccctgagcacaggcccccaccctccactgggctttccccagctcccttgtcttcttatcacggtagtggcccagtccctggcccctgactccagaaggtggccctcctggaaacccaggtcgtgcagtcaacgatgtactcgccgggacagcgatgtctgctgcactccatccctcccctgttcatttgtccttcatgcccgtctggagtagatgctttttgcagaggtggcaccctgtaaagctctcctgtctgactttttttttttttttagactgagttttgctcttgttgcctaggctggagtgcaatggcacaatctcagctcactgcaccctctgcctcccgggttcaagcgattctcctgcctcagcctcccgagtagttgggattacaggcatgcaccaccacgcccagctaatttttgtatttttagtagagacaaggtttcaccgtgatggccaggctggtcttgaactccaggactcaagtgatgctcctgcctaggcctctcaaagtgttgggattacaggcgtgagccactgcacccggcctgcacgcgttctttgaaagcagtcgagggggcgctaggtgtgggcagggacgagctggcgcggcgtcgctgggtgcaccgcgaccacgggcagagccacgcggcgggaggactacaactcccggcacaccccgcgccgccccgcctctactcccagaaggccgcggggggtggaccgcctaagagggcgtgcgctcccgacatgccccgcggcgcgccattaaccgccagatttgaatcgcsggacccgttggcagaggtggcggcggcggcatgggtgccccgacgttgccccctgcctggcagccctttctcaaggaccaccgcatctctacattcaagaactggcccttcttggagggctgcgcctgcaccccggagcgggtgagactgcccggcctcctggggtcccccacgcccgccttgccctgtccctagcgaggccactgtgactgggcctcgggggtacaagccgccctcccctccccgtcctgtccccagcgaggccactgtggctgggccccttgggtccaggccggcctcccctccctgctttgtccccatcgaggcctttgtggctgggcctcggggttccgggctgccacgtccactcacgagctgtgctgtcccttgcagatggccgaggctggcttcatccactgccccactgagaacgagccagacttggcccagtgtttcttctgcttcaaggagctggaaggctgggagccagatgacgaccccatgtaagtcttctctggccagcctcgatgggctttgttttgaactgagttgtcaaaagatttgagttgcaaagacacttagtatgggagggttgctttccaccctcattgcttcttaaacagctgttgtgaacggatacctctctatatgctggtgccttggtgatgcttacaacctaattaaatctcatttgaccaaaatgccttggggtggacgtaagatgcctgatgcctttcatgttcaacagaatacatcagcagaccctgttgttgtgaactcccaggaaygtccaagtgctttttttgagattttttaaaaaacagtttaattgaaatataacctacacagcacaaaaattaccctttgaaagtgtgcacttcacactttcggaggctgaggcgggcggatcacctgaggtcaggagttcaagacctgcctggccaacttggcgaaaccccgtctctactaaaaatacaaaaattagccgggcatggtagcgcacgcccgtaatcccagctactcgggaggctaaggcaggagaatcgcttgaacctgggaggcggaggttgcagtgagccgagattgtgccaatgcactccagcctcggcgacagagcgagactccgtcataaaaataaaaaattgaaaaaaaaaaaagaaagaaagcatatacttcagtgttgttctggatttttttcttcaagatgcctagttaatgacaatgaaattctgtactcggatggtatctgtctttccacactgtaatgccatattcttttctcacctttttttctgtcggattcagttgcttccacagctttaatttttttcccctggagaatcaccccagttgtttttctttttggccagaagagagtagctgttttttttcttagtatgtttgctatggtggttatactgcatccccgtaatcactgggaaaagatcagtggtattcttcttgaaaatgaataagtgttatgatattttcagattagagttacaactggctgtctttttggactttgtgtggccatgttttcattgtaatgcagttctggtaacggtgatagtcagttatacagggagactcccctagcagaaaatgagagtgtgagctagggggtcccttggggaacccggggcaataatgcccttctctgcccttaatccttacagtgggccgggcacggtggcttacgcctgtaataccagcactttgggaggccgaggcgggcggatcacgaggtcaggagatcgagaccatcttggctaatacggtgaaaccccgtctccactaaaaatacaaaaaattagccgggcgtggtggtgggcgcctgtagtcccagctactcgggaggctgaggcaggagaatggcgtgaacccaggaggcrgagcttgcagtgagccgagattgcaccactgcactccagcctgggcgacagaatgagactccgtctcaaaaaaaaaaaraaaagaaaaaaatctttacagtggattacataacaattccagtgaaatgaaattacttcaaacagttccttgagaatgttggagggatttgacatgtaattcctttggacatataccatgtaacacttttccaactaattgctaaggaagtccagataaaatagatacattagccacacagatgtggggggagatgtccacagggagagagaaggtgctaagaggtgccatatgggaatgtggcttgggcaaagcactgatgccatcaacttcagacttgacgtcttactcctgaggcagagcagggtgtgcctgtggagggcgtggggaggtggcccgtggggagtggactgccgctttaatcccttcagctgcctttccgctgttgttttgatttttctagagaggaacataaaaagcattcgtccggttgcgctttcctttctgtcaagaagcagtttgaagaattaacccttggtgaatttttgaaactggacagagaaagagccaagaacaaaattgtatgtattgggaataagaactgctcaaaccctgttcaatgtctttagcactaaactacctagtccctcaaagggactctgtgttttcctcaggaagcattttttttttttttctgagatagagtttcactcttgttgcccaggctggagtgcaatggtgcaatcttggctcactgcaacctctgcctctcgggttcaagtgattctcctgcctcagcctcccaagtaactgggattacagggaagtgccaccacacccagctaatttttgtatttttagtagagatggggtttcaccacattgcccaggctggtcttgaactcctgacctcgtgattcgcccaccttggcctcccaaagtgctgggattacaggcgtgaaccaccacgcctggcttttttttttttgttctgagacacagtttcactctgttacccaggctggagtggggtggcctgatctcggatcactgcaacctccgcctcctgggctcaagtgatttgcctgcttcagcctcccaagtagccgagattacaggcatgtgccaccacacccaggtaatttttgtatttttggtagagacgaggtttcaccatgttggccaggctggtcttgaactcctgacctcaggtgatccacccrcctcagcctcccaaagtgctgagattataggtgtgagccaccacacctggcctcaggaagtatttttatttttaaatttatttatttatttgagatggagtcttgctctgtcgcccaggctagagtgcagcgacgggatctcggctcactgcaagctccgccccccaggttcaagccattctcctgcctcagcctcccgagtagctgggactacaggcgcccgccaccacacccggctaatttttttgtatttttagtagagacgggttttcaccgtgttagccaggagggtctcgatctcctgacctcgtgatctgcctgcctcggcctcccaaagtgctgggattacaggtgtgagccaccacacccggctatttttatttttttgagacagggactcactctgtcacctgggctgcagtgcagtggtacaccatagctcactgcagcctcgaactcctgagctcaagtgatcctcccacctcatcctcmcaagtaattgggactacaggygcaccccaccatgcccaccttatttatttatttatttatttatttatttattttcatagagatgagggttccctgtgttgtccaggctggtcttgaactcctgagctcamgggatccttttgcctgggcctcccaaagtgctgagattacaggcatgagccaccgtgcccagctaggaatcatttttaaagcccctaggatgtctgtgtgattttaaagctcctggagtgtggccggtataagtatataccggtataagtaaatcccacattttgtgtcagtatttactagaaacttagtcatttatctgaagttgaaatgtaactgggctttatttatttatttatttatttatttatttttaatttttttttttgagacgagtctcactttgtcacccaggctggagtgcagtggcacgatctcggctcactgcaacctctgcctcccggggtcaagcgattctcctgccttagcctcccgagtagctgggactacaggcacgcaccaccatgcctggctaatttttgtatttttagtagacggggtttcaccatgctggccaagctggtctcaaactcctgaccttgtgatctgcccgctttagcctcccagagtgctgggattacaggcatgagccaccatgcgtggtctttttaaaattttttgattttttttttttttgagacagagccttgctctgtcgcccaggctggagtgcagtggcacgatctcagctcactacaagctccgcctccygggttcacgccattcttctgcctcagcctcctgagtagctgggactacaggtgcccaccaccacgcctggctaattttttttggtatttttattagagacaaggtttcatcatgttggccaggctggtctcaaactcctgacctcaagtgatctgcctgcctcggcctcccaaagcgctgagattacaggtgtgatctactgcrccaggcctgggcgtcatatattcttatttgctaagtctggcagccccacacagaataagtactgggggattccatatccttgtagcaaagccctgggtggagagtcaggagatgttgtagttctgtctctgccacttgcagactttgagtttaagccagtcgtgctcatgctttccttgctaaatagaggttagaccccctatcccatggtttctcaggttgcttttcagcttgaaaattgtattcctttgtagagatcagcgtaaaataattctgtccttatatgtggcttyattttaatttgagacagagtgtcactcagtcgcccaggctggagtgtggtggtgcgatcttggctcactgcgacctccacctcccaggttcaagcgattctcgtgcctcaggctcccaagtagctgagattataggtgtgtgccaccaggcccagctaacttttgtatttttagtagagacagggttttgccatgttggctaagctggtctcgaactcctggcctcaagtgatctgcccgccttggcatcccaaagtgctgggattacaggtgtgaaccaccacacctggcctcaatatagtggcttttaagtgctaaggactragattgtgttttgtcaggaagaggccagttgtgggtgaagcatgctgtgagagagcttgtcacctggttgaggttgtgggagctgcagcgtgggaactggaaagtgggctggggatcatctttttccaggtcaggggtcagccagcttttctgcagcgtgccatagaccatctcttagccctcgtgggtcagagtctctgttgcatattgtcttttgttgtttttcacaaccttttagaaacataaaaagcattcttagcccgtgggctggacaaaaaaaggccatgacgggctgtatggatttggcccagcaggcccttgcttgccaagccctgttttagacaaggagcagcttgtgtgcctggaaccatcatgggcacaggggaggagcagagtggatgtggaggtgtgagctggaaaccaggtcccagagcgctgagaaagacagagggtttttgcccttgcaartagagcaactgaaatctgacaccatccagttccagaaagccctgaagtgctggtggacgctgcggggtgctccgctctagggttacagggatgaagatgcagtctggtagggggagtccactcacctgttggaagatgtgattaagaaaagtagactttcagggccgggcatggtggctcacgcctgtaatcccagcactttgggaggccgaggcgggtggatcacgaggtcaggagatcgagaccatcctggctaacatggtgaaaccccgtctttactaaaaatacaaaaaattagctgggcgtggtggcgggcgcctgtartcccagctactcgggaggctgaggcaggagaatggcgtgaacctgggaggtggagcttgcagtgagccgagatcgcgccactgcactccagcctgggcgacagagcgagactccgtctcaaaaaaaaaaaaaaaagtaggctttcatgatgtgtgagctgaaggcgcagtaggcagaagtagaggcctcagtccctgcaggagaccyctcggtctctatctcctgatagtcagacccagccacactggaaagaggggagacattacagcctgcragaaaagtagggagatttaaaaactgcttggcttttattttgaactgttttttttgtttgtttgttttccccaattcagaatacagaatacttttatggatttgtttttattactttaattttgaaacaatataatcttttttttgttgtttttttgagacggggtcttactctgtcacccaggctgagtgcagtggtgtgatcttggctcacctcagcctcgaccccctgggctcaaatgattctcccacctcagcttcccaagtagctgggaccacaggtgcgtgtgttgcgctatacaaatcctgaagacaaggatgctgttgctggtgatgctggggattcccaagatcccagatttgatggcaggatgcccctgtctgctgccttgccagggtgccaggagggcgctgctgtggaagctgaggcccggccatccagggcgatgcattgggcgctgattcttgttcctgctgctgcctcggtgcttagcttttgaaacaatgaaataaattagaaccagtgtgaaaatcgatcaggraataaatttaatgtggaaataaactgaacaacttagttcttcataagagtttacttggtaaatacttgtgatgaggacaaaacgaagcactagaaggagaggcgagttgtagacctgggtggcaggagtgttttgtttgttttctttggcagggtcttgctctgttgctcaggctggagtacagtggcrcaatcacagctcactatagcctcgacctcctggactcaagcaatcctcctgcctcagcctcccagtagctgggactacaggcgcatgccaccatgcctggctaattttaaatttttttttttctcttttttgagatggaatctcactctgtcgcccaggctggagtgcagtggcgtgatctcggctgacggcaagctccgcctcccaggttcactccattcgcctgcctcagcctcccaagtagctgggactacaggcgctgggattacaaacccaaacccaaagtgctgggattacaggcgtgagccacygcacccggcctgttttgtctttcaatagcaagagttgtgtttgcttcgcccctacctttagtggaaaaatgtataaaatggagatattgacctccacattggggtggttaaattatagcatgtatgcaaaggagcttcgctaatttaaggcttttttgaaagagaagaaactgaataatccatgtgtgtatatatattttaaaagccatggtcatctttccatatcagtaaagctgaggctccctgggactgcagagttgtccatcacagtccattataagtgcgctgctgggccaggtgcagtggcttgtgcctgaatcccagcactttgggaggccaaggcaggaggattcattgagcccaggagttttgaggcgagcctgggcaatgtggccagacctcatctcttcaaaaaatacacaaaaaattagccrggcatggtggcacgtgcctgtagtctcagctactcaggaggctgaggtgggaggatcactttgagcyttgcaggtcaaagctgcagtaagccatgatcttgccactgcattccagcctggatgacagagcgagaccctgtctctaaaaaaaaaaaaaccaaacggtgcactgttttcttttttcttatcaatttattatttttaaattaaattttcttttaataatttataaattataaatttatattaaaaaatgacaaatttttattacttatacatgaggtaaaacttaggatatataaagtacatattgaaaagtaattttttggctggcacagtggctcacacctgtaatcccagcactttgggaggccgtggcgggcagatcacatgagatcatgagttcgagaccaacctgaccaacatggagagaccccatctctactaaaaatacaaaattagccggggtggtggcgcatgcctgtaatcccagctactcgggaggctgaggcaggagaatctcttgaacccgggaggcagaggttgcggtgagccaagatcgtgcctttgcacaccagccwaggcaacaagagcgaaagtccgtctcaaaaaaaaagtaattttttttaagttaacctctgtcagcaaacaaatttaacccaataaaggtctttgttttttaatgtagtagaggagttagggtttataaaaaatatgrtagggaagggggtccctggatttgctaatgtgattgtcatttgccccttaggagagagctctgttagcagaatgaaaaaattggaagccagattcagggagggactggaagcaaaagaatttctgttcgaggaagagcctgatgtttgccagggtctgtttaactggacatgaagaggaaggctctggactttcctccaggagtttcaggagaaaggtagggcagtggttaagagcagagctctgcctagactagctggggtgcctagactagctggggtgcccagactagctggggtgcctagactagctgggtactttgagtggctccttcagcctggacctcggtttcctcacctgtatagtagakatatgggagcacccagcgcaggatcactgtgaacataaatcagttaatggaggaagcaggtagagtggtgctgggtgcataccaagcactccgtcagtgtttcctgttattcgatgattaggaggcagcttaaactagagggagttgagctgaatcaggatgtttgtcccaggtagctgggaatctgcctagcccagtgcccagtttatttaggtgctctctcagtgttccctgattgttttttcctttgtcatcttatctacaggatgtgactgggaagctctggtttcagtgtcatgtgtctattctttatttccaggcaaaggaaaccaacaataagaagaaagaatttgaggaaactgcgragaaagtgcgccgtgccatcgagcagctggctgccatggattgaggcctctggccggagctgcctggtcccagagtggctgcaccacttccagggtttattccctggtgccaccagccttcctgtgggccccttagcaatgtcttagraaaggagatcaacattttcaaattagatgtttcaactgtgctcytgttttgtcttgaaagtggcaccagaggtgcttctgcctgtgcagcgggtgctgctggtaacagtggctgcttctctctctctctctcttttttgggggctcatttttgctgttttgattcccgggcttaccaggtgagaagtgagggaggaagaaggcagtgtcccttttgctagagctgacagctttgttcgcgtgggcagagccttccacagtgaatgtgtctggacctcatgttgttgaggctgtcacagtcctgagtgtggacttggcaggtgcctgttgaatctgagctgcaggttccttatctgtcacacctgtgcctcctcagaggacagtttttttgttgttgtgtttttttgtttttttttttttggtagatgcatgacttgtgtgtgatgagagaatggagacagagtcccyggctcctctactgtttaacaacatggctttcttattttgtttgaattgttaattcacagaatagcacaaactacaattaaaactaagcacaaagccattctaagtcattggggaaacggggtgaacttcaggtggatgaggagacagaatagagtgataggaagcgtctggcagatactccttttgccactgctgtgtgattagacaggcccagtgagccgcggggcacatgctggccgctcctccctcagaaaaaggcagtggcctaaatcctttttaaatgacttggctcgatgctgtgggggactggctgggctgctgcaggccgtgtgtctgtcagcccaaccttcacatctgtcacgttctccacacgggggagagacgcagtccgcccaggtccccgctttctttggaggcagcagctcccgcasggctgaagtctggcgtaagatgatggatttgattcgccctcctccctgtcatagagctgcagggtggattgttacagcttcgctggaaacctctggaggtcatctcggctgttcctgagaaataaaaagcctgtcatttcaaacactgctgtggaccctactgggtttttaaaatattgtcagtttttcatcgtcgtccctagcctgccaacagccatctgcccagacagccgcagtgaggatgagcgtcctggcagagacgcagttgtctctgggcgcttgccagagccacgaaccccagacctgtttgtatcatccgggctccttccgggcagaaacaactgaaaatgcacttcagacccacttatttmtgccacatctgagtcggcctgagatagacttttccctctaaactgggagaatatcacagtggtttttgttagcagaaaatgcactccagcctctgtactcatctaagctgcttatttttgatatttgtgtcagtctgtaaatggatacttcactttaataactgttgcttagtaattggctttgtagagaagctggaaaaaaatggttttgtcttcaactcctttgcatgccaggcggtgatgtggatctcggcttctgtgagcctgtgctgtgggcagggctgagctggagcmgcccctctcagcccgcctgccacggcctttccttaaaggccatccttaaaaccagaccctcatggctrccagcacctgaaagcttcctcgacatctgttaataaagccgtaggcccttgtctaagygcaaccgcctagactttctttcagatacatgtcyacatgtccatttttcaggttctctaagttggagtggagtctgggaagggttgtgaatgaggcttctgggctatgggtgaggttccaatggcaggttagagcccctcgggccaactgccatcctggaaagtagagacagcagtgcccgctgcccagaagagaccagcaagccaaactggagcccccattgcaggctgtcgccatgtggaaagagtaactcacaattgccaataaagtctcatgtggttttatctactttttttttctttttctttttttttgagacaaggccttgccctcccaggctggagtgcagtggaatgaccacagctcaccgcaacctcaaattcttgcgttcaagtgaacctcccactttagcctcccaagtagctgggactacaggcgcacgccatcacacccggctaattgaaaaatttttttttttgtttagatggaatctcactttgttgcccaggctggtctcaaactcctgggctcaagtgatcatcctgcttcagcgtccgacttgttggtattataggcgtgagccactgggcctgacctagctaccattttttaatgcagaaatgaagacttgtagaaatgaaataacttgtccaggatagtcgaataagtaacttttagagctgggatttgaacccaggcaatctggctccagagctgggccctcactgctgaaggacactgtcagcttgggagggtggctatggtcggctgtctgattctagggagtgagggctgtctttaaagcaccccattccattttcagacagctttgtcagaaaggctgtcatatggagctgacacctgcctccccaaggctttcatagatcctctctgtacattgtaaccttttattttgaaatgaaaattcacaggaagttgtaaggctagtacaggggatcccgcataccgttctcctccttttccccgttgtgaggacagtgcactgtattcactttcaacatccaaggtctgtgttgagagggtgagttgtgcggcccagcttgccccaagcccgtcttgccatcacgaaggatttcctgactcagctgaatctagctcaacaaagcaaaggactaactaagctgcagattttctctccgctgggcttagcctacattatttacacctgttttcagctggatgggaccaaactggggccttgacttctggggtttccacgtgatccccaaagaggagacatccattcattcactcaggtatttgcttgtgcacctactgtgcgccaggtgccagatccaggaattgaagcccaggaacaactcttgcagtgagctccccgggtttttgttttctgaacggtgggaagacaggtcagcaaatagccatgcacgtctgcacatgtgtggctggtgtctgcaggagtaccgagaagacggtgagctctgccctggatggcaacaggaaagggcatccctgtgcagctgtttgtcctggcacaggtggcaggctgccagcgggaccaggaagggaaggggaggatgcacaggtcggagggaacggaacgggcactgcaggtgcgctctgcgatgtgaggaaggaagcaaaggctggttccgggatgatgtcggagaagccttgcagcctagggcactgcccattccacgttacccagtgagtcaaagcctcccagaaagacatttagtcactcaaagccagtgcaggtctcagctttgtccggggaggaactttcactctagaaaacacgaactcatttccctttgaggaagttgtttctccaggatatcatttccagccaccatccaggatgctgggcaggtgctgcagtgcccaaggcacggctgccgaagaagcttgtcccttagaaaccccttgtggcctcggaggcgcctgcctgcctccctgagaatggaaccctgttgggccgccaggctcgctgggcaggtgctggggaaggctgggtcaccgtgctgagcccctcacaggcctgggagttgtgcttggggaggagagctcccagctctttggctgcctcccaatcatggccacatctcacaaacaataccactgtccacgaaaaatgaaaaggtgcctggttctaacccatggccccaaccatgaaagagcccttagaatgtgggggtttgactcgaacagtggctttgagtctcccaggggggattagtgtcctaatgccctgagttaatgaattgacttgttggacagggaaactcagtgaggttcattttctgtggggggacgtttgtcaaatgctgtgaaatcagttgtagcatacgcgacgctcagctgctccgacagtgactcagccacggctccagctgcttccccagccctgtagtggaggtggcagatggtgtcatcagcctggcgcagagggctgtgcccactggcatcacaagggccaggcctgctggtcctccagccactggatccaggtagttacatatgggtttaaaagaagagaggcagggccagttgcggtggctcatgcctgtaatcccagcactttgggaagccgaggtgggtgatcatttgaggttaggagttcaagatcagcctgaccaacatggcgaaacccagcctccactaaaaatacaaaaaaattagctgggcatagtgctgggtgcctgtagtcccagctactcaggaggctgaggcaggagaattgcttgaacccggaaggcagaggttgcaatgagtcaggatcatgccactgcactccagcctgggcaacagaacgagactctaaaaaaaaaagatcaataaataaaataaaaataagagaggcagggtgggagtattacttgaggccaggagtttgagaccagcctgggtaacaaagcaagaccctgtctctaccaaaataataatttaaaaaattacccgggaatggtgtgacatgcctgtggtcccagctactctggaggctgaggtgggaggaacactcgcacataggaagttgaggctgcagtgagccgtgatcacaccactgcaccactctagcctgggtgacagagcaagacctcatctctggggaaaaaaaaaaaaagaagaggcttggaagccacattgttttttgtcacttataactagagtttcgtccatcaaaagcccattctgcactgatttcagtgataggggtctgatgctggcttggaagagggcctgacagcttagagacaggcttggagttccaagttgatgaaagaacgatgaataatgaaaaataatgtgttgttctaaagtagtgccttttcatactgagctagggtataatttgggtccatttcaagggaaatatactagcagaattcatcaaagtagcccctcgaagactggtgcctgctgcctacgggacaatttaatcagtggttccagctgcacatctagagttgggaacactgaacccaggctttctcatgcagatggggtgtggattgctaaggtggctgtctcctagcgctgcagcatgagtgaaacacgtgtccattctacagagacgcggctccgtgatgctgaaacctccttctttttttttttttttgagacggagtcttgctctgtcgcccaggctggagtgcagtggcgatatcttggctcactgcaacctccgcctcctgggttcatgcaattctcctccctcagcctcctgagtagctgggactacaggcgcgtgccaccatgcctggctaatttttgtatttttagtagagacagggtttcaccgtgttagccaggatggtctcgatctcctgacctcgtgatctgcctgcctcggcctcccaaagtgccgggattacaggcgtgagccactgcaccccgctgaaacctccttctagataacagcggcgttaagcatttttttttttttttgagatagagtgttgctctgttgcccaggctggagtgcagtgatgcgatctcggctcactgcaacctccacctcccaggttcaagcaattcttctgcctcagcctcccgagtagctgggactacaggcacacgccaccaggcccagctaatttttgtatttttagtagagacggggtttcagtatattggccaggctggtctcgaactcctgacctcatgatccacccgtctcagcctcccaaagtgctgggattacaggcgtgagccactgcacctggccaaaacctcctcctagataacagtggcgttaagcattttttttttttttgagatggagtcttgctctgttgcccaggctggagtgcagtggtgtgatctcagttcactgcaacctctgcctcccgggttcaagtgattcttctgcctcaggctcctgagtagctgggataacaggcatgagccaccactcccagctaatttttgtatttttagtagagacagggttttgccatgttggccaggctggtctggaactcctgacctcaagtgatcctcccacctcggcctcccaaagtgctgagattacaggcgtgagccactgcacctggcctttttttgttttttaagacagggtctcactctgttgatcacagccacagctcactgcagcctcaacctcctgcctgggttcaagcaatcctcccaccttggcctcccaggtagctgagaccacaggcacaagccaccatatctggccctacgtaagctttatgtgggtgcaataacagatctcaaaccagctctcagctcaagagaaggggaagctgggcacagtggctcacgcctataatcccagcactttgggaagccgaggcaggaggatcacttgaacccaggagttcgagaccagcctgggcaacatagggagacccctgccctccctgtctctgaaaaaaaaaaaaaaaaaaaaagaaaggagaggctgggcttggtggctcacacctgtaatcccagcactttgggaagcccaggcaggaggatcacttgaaccctggagtttgagtccagcctgggcaacatagggagaccttgtctctaaaaaaataaatagagtgagagagagaaggggaagtcaccgggaggacacacatggagcacgcagcccaaatggggctcctctgttctccctgcagagtcagttcgtacctttcacatgcacaaaggtgttgatccaaccgaagcaatattgattcttgttatattgctttattgtggggtcagtgtcagagtaccacgagttttcatcacgcaccgttctttccccagctgcagtgtgtttagggggggaacgaggccccaccccctatccctatcgcctctgcctttataacggctgctactctctgagcacctgttgagttctttcaccttccagatctaatgtgctatccccacccctagagaacagggctgctggatgccacatggctcccagagaggggctgtggtcagggaagccccagctccaagggggctggaaaaccccagagctgcccacgtgcggcaacacagtctggtgctgcaggtgtgaggacggctacaaaatacctgagccattctgtcactctgtctgaactctgtttgaaatattgtttcaataactgctaggctggtttttccttcctgactatattcctcaaaccaacaagagcctagcagaggaaagcatggccaaaacgccccaagaagagagccttggcttcacctccaagggccaccatccgggaggatgtcctcagacctctgatcccctctctgcaggctctgcccagccctgtgtggcaacccagaggaagcctccccttcgtttgagatttaaccccagaccttaggcgatggctgcccagcctgtcccttccgcctgtgtggctgcccacgcgggcgttgctcatggggctagtcctgggtggatgggtgggggcctctcgccggctcctctgcctcccacccccactggcaccccacgcctgtcctagaaggttctttctgcctgttttctccgtgagtgactggacaggcagaggccggccttgctggagggggcatttgtaattatgagtgaatccaaaacaaggttttttccttccgcagccccccgcccggctgtggggcccagccactgcacttcaccggatgccgtctggttggtcctcaggactgatacagaccaggaccccagggccagcccgtgccaggctcctatgcttccaggagcacgggtgggtggtcctgctgcctggccggccatcctcctggggtcggtctctggccgatcctccctcctcctctcaagccct

SEQ ID NO: 8784 - DNA, 27115 bp, Homo sapiens
  misc_feature (1)...(27115): n = A,T,C or G, or insertion/deletion polymorphism (see Tables 1-2)
gtcaagaagaaatgaaatacttgggttgatgaataacagttacagaaattgcattgcaattaaaaaaaaaattaccccaaacagataccagatctaggtgattttgtaagcatacaaacatatttataaaagctatttaaaagaatataacaagagaaagcaactcaataaagttatgaatcaaatttaaccttggtacccaaacctgacaaagattatgtaagaaaagaatcagctgggccaggtggctcacatctgttcttctagtactttgggaggccgaggtgggagagttgtctgagaccaggagtttgagaccagcctgggcaacattgcaagacaccatctctacatgaaatttaaaaattagccgggcatggtggcacatacctgtagtcccagctacttgggaagctgagaccttacaagtgagcccaggagtccaaggctgcagtgagctatgatgatcatgccactgcactccagcctgggcaacagagcaagaccctgtctctcaaaatcaaccaaacaaaaagacaatgtaagaaaaaataaaattatgaagatgaatgcaaaaattccaaatgaaatataattaagtaaaacccaattctgtgttataaataaaggtaatactttctaagcaagtaaattcatcccaggaatgcaaggggtagtatgttaatgtggctataatttgccatattaatgaagtgaagggtaaaatcaccagcttaacaaatgcaaaacaataattcaatttttattcaacatgtacttgtcatgttaggccaactaggagtagaagaaaatttctttaactaaataatatatatcaaacaaaatctttgcagcgaactttttttttttgtttgtttgtttgtttgttttctgagacggagtctcgctctgtcgcccaggctggagtgcagtggcgcgatctcggctcactgcaagctccgcctcccgggttcacaccactctcctgcctcagcctcccgaggagctgggactacaggygcccgccaccacgcccggctcattttttgtatttttagtagagacggggtttcactgcgttagccgggatggtctcgatctcctgacctcgtgatctcccacctcagcctcccaaagtgctgggattacaggcgtgagccaccgcgcccggctgcagcaaaaattttaagtactgaaatcctttagaaccatccccattggcagcagaactgaacggggccccactactctccagcgccatttagccgcagtactagtgactaccaccgcaaaggaaaaggaaacaaggccagcgcggcggctcacgcctgtcatcccagcactttgggaggccgaggcggcagatcacgaggtcaggagatcgagaccatcctggctaacacggtgaaaccccgtctctattaaaaatacaaaattagccgggcgtggtggtgcatgcctgtaatcccagctactcgggaggctgagacgggagaatcgcctgatcccaggaggcagaggttgccgtgagccgagatgtcgccattgcactccagcctgggcaacaagagtgaaactccatctcaaaaaaagaaaaaaagaaaaaggaaccaaggcatgctaattgaaaaataacttttcatatctagaaaaaccaggtgaattcataaactattgaaactaagaagtccacaagatcaacccacaaaaagttattaacattcctagcaataacaatactattttaacagcaacctaaatactaaaataaatgtaacaaaagttttggacaaaattatgaaacatgatagaaggtcataaaagaaggcctaaatgggagatttttatggatgggacaattcagtatcaccaaagtgttaactctcccccaagttaatctgtgtatttcatcaaaattccaacagaattctttgtggaattaggaagttgattgtaataaacatagaagataaaggtctgagtatagccgtggtgattcggggagcagaggcaggaggaggagggctcacctaccaggcatctggatagatcataaacctgtcatcagtcgtgacaagggggagagaggctaaactggtcgagcagaattcagattcccaggcagggatgtgtgcagggacctggcttgtcctggggctggtcaatctttggcacggaatggcctcttcaggaacgggtgttattgggacagctgcctttccatgtggatgatggcataaaagtatagcccccccaaacttaagattaaaacattattatgaggaaacagaatattcttattgcctagggcaaggatagatttcttacaaaagacaagctacactttaagagatggacaaaaagataagatggacaatctgagcacatcccatggtgaatttctctccacgctaagaccccggacaagggtgaaaagcaggaccaaggcccagagaagaaaaattctgctcaaaatcataactgttcaaccttgcatacattctctctcttaaactgaaagttagcatcctacagcactggtgtgacacccggcaggcccgagggctcagctgcctccagctgtggccccaagaaggcaaagcacccgggtggggtggagggagcagccccgtgctctactggctgacagtggtgcccaggcccagctgccttctctgcacagacagcagagttccgcttagcacaggcttttcctcgccagtgcacacactgtcagccattggaactggcctgcaagacagcttgctgtggcggctttgcaggcacagggcacacaggcatccgtgcacgcagctcctctgtcctcccatgccctgcaccctctgtcacaaggaaacccttgcttctaggattgcaccaaataggatttggaaccaattggtgcccaagctcaaatcctgttagtggctgcctgtttccctggcatacatgcgtcctgccgagatgcatttggcaccaggtgggatgtgctcactggttcccaaaacgagaacacatagcagtttccctggatgtttgttcaatactattcccgggacctgcccgtagattccaattccttatgggtgtggaagagcctggaaatcacgtgtgtgtaggtgtgtggcatgtgtataggggtgtgtttatgtggtgtgactttggggtatgagtgtggcatgtgtacggtgtgtgtgagtgtggtatgtgtatggcgtgagtttgggttgtgcgagcgtggttctcatgtacgagtgtgagcatggagattctttggtagggaaggagtcagggtctccctctgtcgcccaggcttgagtgcagtggcacaatctcagctcattgcaacctctgcctcccgggttctctgtctctgggaccacaggcatgaaccaccaagcccagctaatttttttattttttgtctagctttggtcttgctatgttgcccaggttggtctggaactcctttcctcaagcgatcctcagtcctcagcctcccaaagtgctgggattacaggcatgagccaccacccaagagattctgatgtcacagacatctgactcacacactccctggacagctcacgtgtgcccaccaccacagtcagggatggctgcagatgaacaaggtgctgacgtggtttctgtagcccccaaacaagcaacttgccttgagatgacaaccaaagttttcctgtgtcctccacactcaagagtgactgtgaggcggaggggcccagcccttcttgcaggcgggaatgagtggatgggtggatcaacagaggctgccacaggagagagggaggcctggcctgggaacagagctgtgaccgtgcccttccccagggtaggggctgaaggaccctcccatcctagtgacagggccacagcatgtccaaggaggccccagaggaggtcccgggagtcctgggagagcctggttagcctccctgaagggaggaagtggggttttgtgagagggatggtgcagcagcccccacacctgctactccgtgtggccgggtccagccccaggcaaggttccaggcatgcccctgggacagacgtgggagggagaccagcaggcaggtccccctcagggaggtatggagcgggtccccggggccaggtggagcccctcacacctgtgtcctcaaggacccacaccaggacaatggccataggcgggcacctgcagccgccctggccagcagtgagacgggcagagagcccagccagatagcccggttcctgccccctcccgcctgcccgcacagagagggctgcatgcaggtgagggtccatcacctgaagagcttcaccagccccgaggccatgagccactgaatctctcagggggttttggcgcttgaggttccccaggtcattctgctgcccagagagggttgaggacctctgacctggagccccaaaggggaagggtaccctaagaccagccagccatctactctcaggtgggaaaggggtagggtttagatatggccccctcccctccacgtcctgaaattaccttgggctgtgctggccgagagccgcggggaccagatttgagctggacgtgagctttattccagacggagcagctactttgtaagcgatctccctgggatcgatatcatggaggggcacagatgggcttcagctgtgctgggtggaagagaaaacatgccctgtcggcccctcagcaagtgctctgctctctggactgagatgcaggtcagcagcaagcagggaggctttgggggtgctgggggctgctttgaaaggcacccctgagctaagacttggctgttgggaaggaatcacctccctccctccagccgtaaaaagaactggacatcagcttccaaagaagtcatcagcaatgcaactgttcacatggaggatactccctgcttgaggggtcagacaggcctgctgggcaacccaggaggcttggatgaccgtctaccccagtgtttttgggatggaaagttccacattctgagaaccctcagtccctgggcaacctggggtggttagtcaccacagcttgtggcttgggcccatgacagcaggtagaaatgacgtggactgccgccagccgggcacagtggctcacgcctgtaatcccagcactttgggaggctgaggcatgtggatcacttgaggtcaggagttcgaaaccagcctggtcaacacggtgaaaccccatctctgctaaaaaaaaaaaaaaatatatatatatatatatatataaattagccaggcatggtgacgtgcacctgtggtcccagctactcaggaggctgaggcacaagaatcacttgaacccgggaggtggaggttgcagtgagattgcaccagtgcactctccagcctggcaacagagcaagactctgtctcaaacaaacaaarcaaaacaaacaaaaagacgtaagatgtggaccgctggagaatgggggtgctgcctgcagtcaaaacggagtgggggtgcccagctcagggccagaatgatcctattcccggcacttctcagtgaggctctgtggctcacctaagaaaccagcctcccttgcaggcaacggcctagctggcctggtctggaggctctcttcaaatatttacatccacacccaagatacggtcttgagatttgactcgcatgattgctatgggacaagttttcatctgcagtttaaatctgtttcccaacttacattaggggtttggaattctagatcgtatttgaagtgttggtgccacacacaccttaacacctgcacgctggcaacaaaaccgtccgctctgcagcacagctggggtcacctgacctttctcctgtcccccccacttgagctcagtggctgggcagcaggggatgcatggccactggccggccaggtgcagctctcagstggggtgttcagaggacgcctgtgtcctcccctcccccatccctctgtcacccttggaggcagagaactttgcccgtcagtcccatggggaatgtcaacaggcaggggcagcactgcagagatttcatcatsgtctccyaggccctcaggctcctctgccttctgcttgggcttcagggctgcctggctgcaggtgcgtccrgggaggttttctccataaacttggtggaagggcagtgggcaaatccaggagccagcccgggcttcccaaaccccgcccttgctccggacacccccatccaccaggagggttttctggcggctcctgttcaatttctttccttctagaaaccagcatccaggcacaggaggggaggcccttcttggtrgcccaggctttggcgggattatttttcaaagaactttaggagtgggtggtgctttcctggcccccatgggcccctgcctgtgaggtcggacaagcgcagggagtctggggcctctcagagtgcaggaagtgcgcacagggtgctcccaggctggggagcacaggtaggggacggtgcgtgggggatggcgcctggggcatgggggatggggtgtgggaaacggcatgtggggcgtaggggatggggtgtggaggatcgggggtggggatggcgtgtggggtgtgggggatgggccgtgggggggtggggcctgggaaacagcatgtggggcnnnnnnnnnnnnnnnnnnnnnnnnnnnnnnnnnnnnnnnnnnnnnnnnnnnnnnnnnnnnnnnnnnnnnnnnnnnnnnnnnnnnnnnnnnnnnnnnnnnnnnnnnnnnnnnnnnnnnnnnnnnnnnnnnnnnnnnnnnnnnnnnnnnnnnnnnnnnnnnnnnnnnnnnnnnnnnnnnnnnnnnnnnnnnnnnnnnnnnnnnnnnnnnnnnnnnnnnnnnnnnnnnnnnnnnnnnnnnnnnnnnnnnnnnnnnnnnnnnnnnnnnnnnnnnnnnnnnnnnnnnnnnnnnnnnnnnnnnnnnnnnnnnnnnnnnnnnnnnnnnnnnnnnnnnnnnnnnnnnnnnnnnnnnnnnnnnnnnnnnnnnnnnnnnnnnnnnnnnnnnnnnnnnnnnnnnnnnnnnnnnnnnnnnnnnnnnnnnnnnnnnnnnnnnnnnnnnnnnnnnnnnnnnnnnnnnnnnnnnnnnnnnnnnnnnnnnnnnnnnnnnnnnnnnnnnnnnnnnnnnnnnnnnnnnnnnnnnnnnnnnnnnnnnnnnnnnnnnnnnnnnnnnnnnnnnnnnnnnnnnnnnnnnnnnnnnnnnnnnnnnnnnnnnnnnnnnnnnnnnnnnnnnnnnnnnnnnnnnnnnnnnnnnnnnnnnnnnnnnnnnnnnnnnnnnnnnnnnnnnnnnnnnnnnnnnnnnnnnnnnnnnnnnnnnnnnnnnnnnnnnnnnnnnnnnnnnnnnnnnnnnnnnnnnnnnnnnnnnnnnnnnnnnnnnnnnnnnnnnnnnnnnnnnnnnnnnnnnnnnnnnnnnnnnnnnnnnnnnnnnnnnnnnnnnnnnnnnnnnnnnnnnnnnnnnnnnnnnnnnnnnnnnnnnnnnnnnnnnnnnnnnnnnnnnnnnnnnnnnnnnnnnnnnnnnnnnnnnnnnnnnnnnnnnnnnnnnnnnnnnnnnnnnnnnnnnnnnnnnnnnnnnnnnnnnnnnnnnnnnnnnnnnnnnnnnnnnnnnnnnnnnnnnnnnnnnnnnnnnnnnnnnnnnnnnnnnnnnnnnnnnnnnnnnnnnnnnnnnnnnnnnnnnnnnnnnnnnnnnnnnnnnnnnnnnnnnnnnnnnnnnnnnnnnnnnnnnnnnnnnnnnnnnnnnnnnnnnnnnnnnnnnnnnnnnnnnnnnnnnnnnnnnnnnnnnnnnnnnnnnnnnnnnnnnnnnnnnnnnnnnnnnnnnnnnnnnnnnnnnnnnnnnnnnnnnnnnnnnnnnnnnnnnnnnnnnnnnnnnnnnnnnnnnnnnnnnnnnnnnnnnnnnnnnnnnnnnnnnnnnnnnnnnnnnnnnnnnnnnnnnnnnnnnnnnnnnnnnnnnnnnnnnnnnnnnnnnnnnnnnnnnnnnnnnnnnnnnnnnnnnnnnnnnnnnnnnnnnnnnnnnnnnnnnnnnnnnnnnnnnnnnnnnnnnnnnnnnnnnnnnnnnnnnnnnnnnnnnnnnnnnnnnnnnnnnnnnnnnnnnnnnnnnnnnnnnnnnnnnnnnnnnnnnnnnnnnnnnnnnnnnnnnnnnnnnnnnnnnnnnnnnnnnnnnnnnnnnnnnnnnnnnnnnnnnnnnnnnnnnnnnnnnnnnnnnnnnnnnnnnnnnnnnnnnnnnnnnnnnnnnnnnnnnnnnnnnnnnnnnnnnnnnnnnnnnnnnnnnnnnnnnnnnnnnnnnnnnnnnnnnnnnnnnnnnnnnnnnnnnnnnnnnnnnnnnnnnnnnnnnnnnnnnnnnnnnnnnnnnnnnnnnnnnnnnnnnnnnnnnnnnnnnnnnnnnnnnnnnnnnnnnnnnnnnnnnnnnnnnnnnnnnnnnnnnnnnnnnnnnnnnnnnnnnnnnnnnnnnnnnnnnnnnnnnnnnnnnnnnnnnnnnnnnnnnnnnnnnnnnnnnnnnnnnnnnnnnnnnnnnnnnnnnnnnnnnnnnnnnnnnnnnnnnnnnnnnnnnnnnnnnnnnnnnnnnnnnnnnnnnnnnnnnnnnnnnnnnnnnnnnnnnnnnnnnnnnnnnnnnnnnnnnnnnnnnnnnnnnnnnnnnnnnnnnnnnnnnnnnnnnnnnnnnnnnnnnnnnnnnnnnnnnnnnnnnnnnnnnnnnnnnnnnnnnnnnnnnnnnnnnnnnnnnnnnnnnnnnnnnnnnnnnnnnnnnnnnnnnnnnnnnnnnnnnnnnnnnnnnnnnnnnnnnnnnnnnnnnnnnnnnnnnnnnnnnnnnnnnnnnnnnnnnnnnnnnnnnnnnnnnnnnnnnnnnnnnnnnnnnnnnnnnnnnnnnnnnnnnnnnnnnnnnnnnnnnnnnnnnnnnnnnnnnnnnnnnnnnnnnnnnnnnnnnnnnnnnnnnnnnnnnnnnnnnnnnnnnnnnnnnnnnnnnnnnnnnnnnnnnnnnnnnnnnnnnnnnnnnnnnnnnnnnnnnnnnnnnnnnnnnnnnnnnnnnnnnnnnnnnnnnnnnnnnnnnnnnnggaatggtgagtggggcatggggatggcgagtagggggtgtggcgtgaggatggctagtggggcgtggggatggcgtgtggggatggcgagtggggggtgggctgtgagggacagtgcctgggatgtggggctgcagccctagctcacagcatggccttatgaccccggccaccttcctgccccaggcggggtcgctaaggcctcaggaggagaaacacgggacatgccgtggaagccggggcctcacagargtgagcagggactgccactggttttgtcctggggcccagtgggggccaacatcacctccttcccctcccatggcaaagagccagcccgcggggtggctactgcagtgccccccaaggagggtgttccctgctcgagaggaagtgaccgctccagcttggccttccctgggactggggtgcaggcgattttatcttctttgctccattctgttccttccagataatcgtgtgttcttcatcaggttttcctcagttcttgagagcttttctgatgcaaatctgctttcaccccagggcggtcaccggctctgctcacaccagcctccaagggtgtgggtgtcccgggagtgtgggtgtcccgggggcgtgggtgtcccgggagtgtgggtgtcccgggggcgtgggtgtcccgggagtgtgggtgtcccgggggaagtgggtgtcccgggagtgtgggtgtcccgggggagtgggtatcccgggagtgtgagtgtcccaggggcgtgggtgtccgggggcgtgggtgtcccgggggtgtgggtgtcccgggggtcgtgggtgtcccgggagcgtgggtgtcggggactgcagggacatgggcctcccctcccactcctgccgcccagggcacctcctgtgaggactcggagtccgtgagttcccacctccttgagcccgattctttggtgtccccgcctgcatcctcagcctccttccaaaccagaccagttctctaggggcgtcgacgtgtgaaactgattttaaagaaaacaggcrgtggcctttctctcggccccacgtggcccagtagcgctcaccttccgtcccttcttccgcgctcagtaaccaatttaggccgctcctgcagaactcgggctcctgcccaccggcccacagcgtccacctgaggcctcktcctcccagcaaaggtcgtccctccggaacgcgcctcctgcggcctctccagagcccctcccgcgcgtcctctcagccccgctcgcctcctcccggggcctccctctcccgcctgcccccaggcccgtctcccctcgcgggctgaggcaggttcgggcagcacggccgccccggggcgggggtcactctccaccaccgcgtggtgcccacagctcacggcgctcccgggtgacggtcccctcggctgtagggcgtcctgaagagcggcctgctcggagctgagcgcacggggttgcctssccctgggcgtctctggccctcaccagccccgtcttcccatgggcaaaacggcggtcctgtttgtccacaagtaaccgtcggggttacggaggggccaggagctgcggcggggggctgtgctctcaggaccggccccaggaggatccgcgcgaggtctggagctctcaggggtcgcgggggacagaggggccccaagcggaggcggggaaggcggcagaagcccaggaccgccaagagctggcgaggaagcccggggctcgctgtcgggggagccgggcaggggccgcgcctcggaccaggacggaggcctggggaaggcggatctggccgccggagacgcggtgcgggtggagacgagggatttggatttccgcgggcggctgyacggatttccacgcgcggttcacgtgggccccagggggktgcccggcacccggggccgcgccgccttctcctssccggcatcgacccgcagcctcacgtttacgcggcggcgcccgcagcccccttcggcccggcttccgcgcgtgcccccgagcgcgccctcgggatcagcccccggaagcagagaggccaggccgggaaggatgggcgamsggggtggctgacccgggagcacggcagggaggacacccagccaggcccgcgagcagcgccgctcccctcctccaggacgggcgggaacctgcgatgcccccgccgcgtgggccgtggggcggtctccgaggcactgggcggggcacgcggtgggcgcttcacggaactcgcatttcccagtcttcgtaacccaggaggaagcccacggcgtcctgcaccggcgccggcgcgccaacgcgytcctggaggagctgcggccgggctcccwggagaggragtgcaagsaggagcagtgcyccttcgaggaggcccgggagatcttcaaggacgcggagaggacggtgagcccagcctcggggcgccccgcgccgcggacactgcaggcggcggtgaaccaggccgcgtggggccrcctgcgtctctttggctgcggctgtgggcggcgaacacgcagcggcgcccgcgcggcgctytctgcgggggtcgctttccgcccggggtgactccgctttcctgggcgatgccccccacccccaggcacgcgctctccccgtgcggccgcaccgcgcatgccggttttcacatcagaaaatacgatttgcaaagcacacttagggtgtcccccttaacttcccaagggagtccccccagtccccgaagggtccagggcagcctgcgcatcgcagacgcgcgcggctcgcagaagggacgtggtgagaagctggcccacagcatgccaccagcggcacctcctcagggcacgtgtcggggagaaacaacacttagggacctgggactttctccagctcacgctcacgggtcacctcacactccaagatcacctcaaagaggacacctcacacagggcacacttcacactcacaggtcacctcacactcacaggacacctcacactcacagggcacacttcacactcacgggtcacctcacactccaagatcacctcaaagaggacacctcacacagggcacacttcacactcacaggtcacctcacactcacaggacacctcacactcacagggcacacttcacactcacgggtcacctcacactccaagatcacctcaaagaggacacctcacacagggcacacttcacactcacgggtcacctcacactcacaggacacctcacacaagacacctcacacggggcacacttcacactcacaggtcacctcacacccacaggacacctcacacagggcacacttcacactcacgggtcacctcacactcacaggacacctcacacaagacacctcacacggggcacacttcacactcacaggtcacctcacacccacaggacacctcacacagggcacacttcacactcacgggtcacctcacactcacaggacacctcacactcagggcgcacttcacactcacgggtcacctcacacccacaggacacctcacagaggtcacctcacacaggacacctcacactcagggtgcacttcaaacccacaggtcatttcacctcacactcacaggacacctcacacaagataccacacggggcacacttcacactcacaggtcacctcacactcacaggacacctcacagaggtcacctcacacggggcacacttcacactcacaggtcacctcacacccacaggacacctcacagaggtcacctcacacccacaggacacctcacacaggacacctcacagaggtcacctcacacccacaggacacctcacactcataggtcacctcagtcttacaggacaactcacactcacaggtcaccttactctcacaggacacctcacactcacaggtcaccttactctcacaggacacctcactctcacaggacacctcacacagggcacacttcactcccacaggtcaccatacctcacacagatcacctcatactcacagatcacttcattctcacaggatacctcacactcagggcacacttcacactcacaggtcacacctcacacagatcatctcattctcacaggacacctccctctcacaggtcacctcacactcacaggacacctcacagaggtcacctcacacccacaggacacctcacagaggtcacctcacacggggcacacttcacactcaggtcacctcacacccacaggacamctcacagaggtcacctcacacccacaggacaactcacagaggtcacctcacacaggacacctcacaaaggtcacctcacacccacaggacacctcacactcataggtcacctcagtcttacaggacaactcacactcacaggtcaccttactctcacaggacacctcacactcacaggtcaccttactctcacaggacacctcacacagggcacacttcactcccacaggtcaccatacctcacacagatcacctcatactcacagatcacttcattctcacaggatacctcacactcagggcacacttcacactcacaggtcacacctcacacagatcatctcattctcacaggacacctccctctcacaggtcaccttacactcatctcacactcacaggtcgccacacctcacactcacaggatgcctcacactcacagaaccacatctcatatgcacaagacacctcacactcaggacacctcatgctcaaagaagcctcacactcacaggaggtccagctgtctgaggcaaaggctaacatgaccctttccagacaaattgaggatggtcatgcctagcatttttatacacctagttttgaaagcatttctcatctgttgtattctcacagcaccccgtgagtttaagttcaggtggccaacagtttcttcagcaatcacttttttctgtggagtgcttttgctgtttgtggaatattttgcatctgctactgcaccctctccccgtatgtgtggccaccctgtcagaggtggagctgtggctcagagcctgtgtacctcgtcccaggtccacagctcagcgacagaagagtcagggttgaacctcgggtgttctgacttgggagcaggaaatgtgtggtcacccatagttccagatgtcctggggaggggccaagattagaagaaacctacctcagctccagaggaaagtctggcttcctgagcccaccccgccagacccaggtccaagtcccccaaccccagttcatggtgtgtccagtgcttaccgttgggtgctctggtgaaggtgcatctcacgaggcttgctctcttgttccttcagaagctgttctggatttcttacagtggtgagtggatgatcaccaccagtcctgcctgcaacccttctcagcttactgacaccagcccactccacagatggggaccagtgtgcctcaagtccatgccagaatgggggcycctkmaaggaccagcyccagtcctrtatctgcttctgcctccctgccttcgagggcyrgaactgtgagacgcgtaaggccccactttgggtcccatatttgcagagggccctggggagctggtgraggtggcctggccaaccgggctgcagggtgcacaacctggtggggtgtgtaggccgggcattcagggctcagccccagttggaaattggtctaggtgaccttkaaatcccttccagtctgaggtctttgacagggacccaaggttctgattatcagactcagtggccccttgggctcccggccctgggcaattctcagccctsgagatggcccagctgagagtccctgtgtccctgtcccacttccacatcccaccacgcaggaccgcttggtaaacttccccttctctactttccattacaaaggtttgaggggtttgttttttttttaaccatctgaatattaaattatcacaaagtttrrggcccccaacctcccttgggttcagtaattcactagaaggacwcatagaatccactgaagtggatacactcacaggtaccgtttattacagcaaaggatgcaggcttaagtctgcagagggaccaggsacaagcttccccttgtcctctccctgtggggtcatgtggacagtccttaattctcccagaatgacgtgtgacgagacgtgggaagtactgccaacttgggaagctctacgagccccggtgtccagaggtttkatcagggctcaatsacatagacccagctgaccacccgcatggctgacctcagtctcagcccctccagaggctacgccgatartgcggcccaaggccccaccatacatcacattgtcagctagaccatccagcatggctcaaggcccaggtaaacaccaacattccctcaggcaagaccttccaagggcttagcggtcatttcccaggagccaaggcaaaggctaccctttctctggcacagcagttcatccttgaccacccaagaccacattcttacactgaatgagctctcctgtgcagcagccattttcttctctaagcagaagagagcccagcaagctggaggaggctgaagagagaggcttcctgctggtcatctgggtccagaatgcctgsagatctctgctcagccctggtgcccagcagccctggtgtgcatcctgcagggcaggccttcccgccggagtcctggacttgctcagggccactccccttgcccatgtcaaccaaagtcaggctgccggttctgcttcttctgtctgagcccatgaccagtgctgggactaactgtccccaggcgggctcacggtggtacgaggccagcttggagaactgtctcagctctctggtcctctcgtcagttgggtctctgattggaaagtcccttggacacttttaccatccccatkggactttcactttcccccaggctcccatcagctgctcggaagagtggtcaccctggaggccactgcccaccagccaggcaccccccaaatgcaaccgcagccagcactgccagccactggcaaggctgttcagacatgtggctcctctgatccacgccttgtcctttggatcagtccacggagcaggtggtgccaagctcaggctctgtcacccacagctcagtgccaccttccaggcagaacaccactgctgacccagggcatggccaccccggggrctggctctcgctgacccccagaagcccctctcagggtgtccccttcctgtccccagacaaggatgaccagctgatctgtgtgaacgagaacggcggctgtgagcrgtactrcagtgaccacacgggcaccaagygctcctgtcggtgccaygaggggtactctctgctggcagayggggtgtcctgcacacccacaggtgaccaggcttcatgtcccagtcccagatgacaccagtccctgtcccactacggattatcttactggacaaaagacgggtgggagtggcttcacatctactgagcactaactatgcactgaccaattgtgaggtgggatctgggcaccaagggtggcacaggccagagcgacagtgactaggatgggcaccctgggggcaatccctgaatggcctcaggccccctgccaattctaggcagaccaggggagccaagcaaggcactatctcacgtccaactcccactcgcaggacctccgccagggttcatgaatctacttcggcacagccaatgtctgtactgactgctgcccactctgcattccaaaactcgtaaaggctcctgggaaaatgggatgtttctccaaaccagcctggaacgaatgggctgcacttccaaaagcagggacaccccacacccactgtstctcaaagaggcggacgtgcccaccctggccacacagcctgggactcagcctgccacctcctcgggcttcctttctggcccaagaccttgattgaagcagatcaaaactaagcatgggatcaaaacaacacagtttgattcatctttaggtagaatttcattcaccttctactaaagtcaaacaacacatcttctccctgaaaagtgagcagagggcggttttaagacgtaagccctctgtttcctccaaaaccagccctgaccattgtctcctcagccagccacttcttcaaggrcctctcatggccgggccccaccagtcaggcccagccgaggccctgccttccaccacccctgggccctgggagctcctgctcctgggggcctcccatagcctcggcctcaaggcctctcagaggatgggtgtttctgaatctttcctagtggcacgttcatccctcacaaatctctgcatctttctgacttttgttttacacagttgaatatmcaygtggaraaatacctattctagaaaaaagaaatgccagcaaaccccaaggcyraattgtggggggcaaggtgtgccccaaaggggagtgtccatggcaggtaaggcttcccctggcttcaggattccaagccctgagggtcttgaagccttttgaatgtgaacaacagctctggaagggaaaatgggcaggtcagccccaagcccaccaggctccaagtcagcacacctagcacctccagctcgcggcacccccatgcttttagtggggcaaggaaggagaaaasaaaacgacactcactgagggtctaccctgtgcagagaaccctgcgagatgccccatccgagttgtcacgtcgtcctcacggttactctttgaggtgggatctttgcctgatctttgcaaaatcaggagcattgratcaaagctatgtgaagatcctgtgaggtgaacagtgaaatctcacagcgacatttgtattcttgggccgtgcccaagagcacgtctcggctagagaggggcacagcctcccagagccaggtctgagcagctttgcctgggagggatctgcaaagaccccaggatttcagaaagaaattgtgcaatgccagaggttccttggcatgcccrggagggcgagtcatcagagaaacaatgacagcaatgtgacttccacacctcctgtccccccgcccaggtcctgttgttggtgaatggagctcagttgtgtggggggamcctgatcaacaccatctgggtggtctccrcggcccactrtttcgacaaaatcaagaactggaggaaccygatcrcggtgctgggtgggtrccactctcccctgtccgaccgcggtgctgggtgggtgccactctyccctgtccgaccgcggtgctgggtgggtgccactctcccctgtccgaccgcggtgctgggtgggtgccactctcccctgtccgaccgcggtgctgggtgggtgccactctccsctgtccgaccgcggtgctgggtgggtaccactctcccctgtctgaccgcagctctcaagtgtctcaggggctgtggctctgggcttcgtgctgtcacttccacagacagacagacatccccaaaaggggagcaaccatgctgggcacgactgctgtggccaccgtgctctcagccactttcccatgcccaaataaaacgataaaagactgggggcttctgcccatcctgcctcacttgaccaagagcccagaagaggatgcgacacccagggcctcatgggaccaccggctggcaggggttctgctcactgggtttatgggtgagacgagcactcccaggagggccactgggccgggaagaactgtggagaatcggggcacgccctgtcctcccagctgccagggcacagcatcccttccccacctcaacacccagaccccagattcaccccagttcacttgtccccacacgagccacaggctgccacctggggcaggctggccccaccttggggttagatgcaggtccccttgccccagaaggagactgcagcccctgcagacctagaaatggccacagcccatccccatgcaccagggggtgaggtggcaggtggtggaaagggcctgargggggcttcttccttccaggcgagcacgacctcagcgagcacgacggggatgagcagagcyggcrggtggcgcaggtcatcatccccagcacgtacgwcccgggcacyaccaaccacvacatcrygctgctcyrcctgcaccagcccrtggtcctcactgaccatgtggtgcccctctgcctgcccraacggacgttctctgagaggaygctggccttcgtgyrcttctcattgktcagsggctggrgccagctgctggaccgtggcgccacggycctggagctcrtrgtccycaacgtgmscyrgctgatgacccaggactkcctgcagcagtcacggaaggtgggagactccccaaatatcacggagtacrtgtycbgtgcyrrctactcggatggcagcaaggactcctgcaagrrgvacagtggaggcccacrkgccacccactaccrgggcacgtrgtacctgaygggcatcgtcakctgvggccagggctgcgcaaccgtgggccactttgrggtgtacaccrgggtctcccagtacatcgagtggctgcaaaagctcatgcgctcagagccacgcccaggagtcctcctgcgagccccatttccctagcccagcagccctggcctgtggagagaaagccaaggctgcgtcgaactgtcctggcaccaaatcccatatattcttctgcagttaatggggtagaggagggcatgggagggagggagaggtggggagggagacagagacagaaacagagagagacaragacagagagagactgagggagagactctgaggacatggagagagactcaaagagactccaagattcaaagagactaatagagacacagagatggaatagaaaagatgagaggcagaggcagacaggcgctggacagaggggcaggggagtgccaaggttgtcctggaggcagacagcccagctgagcctccttacctcccttcagccaagcccacctgcacgtgatctgctggcctcaggctgctgctctgccttcattgctggagacagtagaggcatgaacacacatggatgcacacacacacacgccaatgcacacacacagagatatgcacacacacggatgcacacacagatggtcacacagagatacgcaaacacaccgatgcacacgcacatagagatatgcacacacagatgcacacacagatatacacatggatgcacgcacatgccaatgcacgcacacatcagtgcacacggatgcacagagatatgcacacaccgatgtgcgcacacacagatatgcacacacatggatgagcacacacacaccaatgcgcacacacaccgatgtacacacacagatgcacacacagatgcacacacaccgatgctgactccatgtgtgctgtcctctgaaggcggttgtttagctctcacttttctggttcttatccattatcatcttcacttcagacaattcagaagcatcaccatgcatggtggcgaatgcccccaaactctcccccaaatgtatttctcccttcgctgggtgccgggctgcacagactattccccacctgcttcccagcttcacaataaacggctgcgtctcctccgcacacctgtggtgcctgccacccactgggttgcccatgattcatttttggagcccccggtgctcatcctctgagatgctcttttctttcacaattttcaacatcactgaaatgaaccctcacatggaagctattttttaaaaacaaaagctgtttgatagatgtttgaggctgtagctcccaggatcctgtggaattggatgttctctccctgccacagcccttgtcaatgatatttcacagagaccctgggagcacctgctcaagagtcagggacacacgcatcactaaatgcaagttcccaggccctggctgcagtgggaggacctggcaagctgcactcttgctgagtccccagggtggtggaagaagaatgagaaacacatgaacagagaaatggggaggtgacaaacagtgcccccactcagactccggcaagcacggctcagagagtggactcgatgccatccctgcagggccgtcctgggcaccactggcactcacagcagcaaggtgggcaccattggcactcacagcagcaaggcaggcaccagcaacccacctcgggggcactcaggcatcatctacttcagagcagacagggtctatgaactacagccgtgggctgcttccaaggcaccctgctcttgtaaataaagttttatgggaacacacccatattagtgtccatggagtggccgtggcagagacgtccagccggacagaccagctgacccgccaagcccagcatggttagtgtcaggacctctgctgaagatgcttgctgaccctggccagaccccggttcctaatgccccctaaacgggacgggagccagtggcgggccctgatccaggtcagagctggctctgctttctcttttgtccgagtgaccatgcctcagtttcctcatctgtaaaacaggagcccaccgtgatgcttatggtgggatgagatcagcatggatggaacaaggccctggaagggcccatgccatggtcatcgacagcaaagccactctgcagacagatgcttcagtgaattggtagaaaattctgcaaccagaatgcccggggctcctgagggcctaagcccagcccagggttctggaagccgctctgacttcttgggagtggaagttggcaggactcttcctgggaagaagcggagggtggggatgagaggacagttcaggagcccacccagacccacaggaggaaactaggggagtcatgcggggtcctggtggagcgccagcctcccttcctgccaatgggaaatgcaggcgcccacctcatggtgctgccggaggagggggcccgggactccccagaggcttcgctgaagggcctgggcgcccccaaaggctacatgtttcatatgggacgtgccacctgccacggctcagctccagctttctgtgagtggcgagatagaatacggggaggccactggccatgggcctgggacagggtgggatgaggcggcaggcttgggccaccaaagccagcatcgccacccagcattgatgacaaagactgcgtgtctgccatgagcatcctgctgttggtgcacacaccgcattggtctctccatacaaacatgcctagaggcgatgtcagagggtggagaccaggagaggcaggagtcagacatctggtgccaccaggaaggcccttctcagaggaccaggctgtgcgtggtgcccgccgtgggaggccagcctggcgttggcatccagcatcatcagtttgtgcagttgggtggggctcagtgagtgcctcctgtgtgccaggcacaatgacgcacaatgtgtgcacaccaggctcatgtgcaggtggctgcgagacagggcgacccatcaaggcagatgcaccatgaggcagtggccagtgctgtgggtgttaggggcattgctccccggccactacggcatagcaggcagtgatcgccacactggccaagctttagaccatttattccagagaccccagaggcaaaaagcccggctgcacctcccagtgactcccacagccattgagcagagacgctcaggaccttgtgatgggaggtttctgcactggagaacgagcccagaagccctctcagcctcggaacagtgtggccagtggtgggcaggtcaggaggggcttcagacacagcctgtccctccagatggtcacgggaaggtcactccccacagaagtacgttttggggccatgcgggcacagaaggtttgggggtgggtggggcaggtgccagcctggcctgtgggaggccatggtgcagatgccaagcccccccgtgacatgagaccacctgataccacccagagagtggctgtgagcggaagggcccgcccagaaacaagcagggccttggggcagaagtcctgggctcagatcccacgctcactgccagcggcctcggctcaggcttctgcgctctctaaacttagttttctcttctggaaaaatgatggggaaaatgatatttgtatgtgattgtgaggactgagagttaaatgtaaacatctggaaactacaaaatgagcacgaaatgatgtttttattcttagaacagaaagtccccacacccgcggccctggtgactgatgaggatgaggttccgaggggcctctctggccgcccagctctgcctggggaaggtggggccagagtggatgtgttcccagcgtggtcactcccctgcctcgccagcaggtctcggctccaatcaggaggcctaagccaagtgataagcagccagacaacagccatcccagctggggcgtggactttgctccagcagcctgtcccagtgaggacagggacacagtactcggccacaccatggggcgcccactgcacmtcgtcctgctcagtgcctccctggctggcctcctgctgctyggggaaagtcgtaagtgcccctcgcccttcagacccaaaagcagcgccagggagcagggaggggcggcagttggggaaaccctctcatctctgcagcctggacggtgggtgccttgagtgctgccagaggctgggctcggatggctgggcttggcctttccagccaacggcatcctcaaggccagctgtggctccctggggctgagagtcagacgggcggatcagaggtcacagagacaaaaacacaaggacagagtcagagagagaaagggagagggaaggagaaacggagacacagtgagatgggaggccaagaggcagagacagaggtagaaagacggagacagagagagagggaggggttggggcaggcagagacaggacagttagccatctgccaccacagggaggcacaggacgaggggcacagcagaggagctcccagggaggaggaggctgagccgagccagtgccaccactctcggactggctccgtcggggaaggagctgcctaatgcacagctggacaggtgggggcagcagggctgtccaggacccccgggtctgtccaaaagcagaggcccagacaggacagaagccaggcmagcctggggacagcggaggaagaggaggcccctctggtggggacacgagagacagggaccctagacttgtttgcatcctggacaaagtggacaggcaggggcaccaaggggacccaggcctgggaagggaatgtgtgagggagagacggagcagggggagaccctcgtggggtggaaaggggagacccctgggaaggctgagtggatcctcagtgcatcactgacctaaacggcccctccgcctggtgacttggagctccagtcacatcacacgggggtcttctccatcccaccctcaaccccctgccctccccagcctctgtcccctgagccacatcttcctgtctcccacgcggaacgggactcccgtcttcatggggtactgtgtggctccaactcgcccagccttcttcctccccctcaggccacactgccccctgcaggagcccactgtgatgcttgtggtgggatgagatcagcgtgggtggaacaaggccctggaaggacccatgccatcatcatcgacagcaaagctactctgcaaacagacagatgcttccgcgaattggtagaaaattctgcagccggaatgctctaggatcctgaggccctaagcccggcccggggctcccgaggccctaagcccggcccgggactctggaagctgctctggcttattgggaatggaagttggcaggactcctcttcctgggaagaagcagagggtggggatgagaagacaggccaggagcccacccagacccacaggaggaaactaggggagttatgcagagtcctggtggagcgccagcttcccttcctgccaatgggaaatgcaggcgcccacctcgcggacctctgggtccacagggtattggcacccttagctgtgtgatgcgggcctggctcataaccatggcctgtggtgtccccgggggccggcctggaccctgggtggacatggccagccccggagagccagggccaggccatctctctcccctactctgcctcagaggcctcggcagctgcactgtggggtgggtggggctgaacacaggtcccagaaggtcccactcaggaccctgctgtgcacacttttgattttaataaaatcagaatgcgcacagcatctgcagtctagcctttaaacgagcacagctgtcctggcagtcacggaagttcttctggggcggtgggacctcagcattcctttgctggtactgctacaagaaaggacaatggaccaagtagcttaaagcaacagaaacatttctcccacagctctggaggctggaagttcaaaatcaaggcgtcagcggggctggttcctccagaggctgggagagagtctgctctaggcctgtttcctggcctcggggtgccagcggcctcacagcccatggcttgtgggagcattgctcccatcgctgcctccatcatcgcatggggttctcaccatggctgtttttctgtcttcttttctctcagaaggacaccagtcattggatttagggctcactctactcccataaaatgtcttcctaactaaatacatcacaaaagttctatttccaattaaggtcaggttctgaggttctgggaaagacatgaatttggagggacattattcagccctgtcctgccacctgtgagtgttttctgcaatccaactttttattttaataaaatcagaatacgcagagcacctgcagtgccagcctttaaactactgctgttgtactggcaatcattaaagctacgtggcttcagtttcaatctttacattcaacaagtttaaacccattcttcatgagtttggaccttactgactgaaaattttgcttgctggtaaaacttgctcaaatgcagttgctgactgtggaattcactgatgttgccaaaacaacaaacacaactgtgtgctcgaggattgcaatgctcccaacagcttctgaagaaacaaaccacacgacaaatgtctaccaatctggatgctccatatcagagttctagagtgttccattaatttcttgagacaagtgcctaaaaaccttgttttaatttcgttttgccaaaatcccattttactcacatcagaaagtgtggccacgtggcccagacccggcctgctcagtctgactgaagcgttgatgcgactcagccataacagatagcagaagcgcccagattcagtccagagggctgagccaggcacgccatctttccttcattccctcaacacatattggttaagttccggccgtgctaggcacgggcatacagctgtgaccaaacacgtcaagtctttttccagcggagggaaggataagcctgtcagcatgtaatgtcagagaggggttgggtgctagaagacaaatagcacagtgtaaggggatgaaagagacacgagtgggggcaacgtcagagggcgtggtcagggagggtgtctcggagggcgctgggcctgagccacttgggtatctgtggaaagaatgttccagacagggaggtgactggtgcaaaagtcctggggtgtgagtgttgggctcagccagggtcagcgcagagcccagtgtggcagagagaggtgaatgagggcagagttgaaggtggtgaggcctgggaggcctggccatgggaagaccctgggctctgttctaagaccactagaggcagattctgggtagtccttgacttccttgcatcaccctttccaccccgtgcctgccacctgtaccctcttcctcacacagtccagctcaaccttataggccgtgtcctacccccatgagctggggagagctgagcaggcttcagggagatgggaaaaggcgggaactggacaggggctgcaaaggaaaggtgacttcttactggtcaatcagcctggggatgctcgggggtggatgccaaggggaacagagctgtggccgctatcacagaacagcgagttcctctaagaggtcagaggaggc

SEQ ID NO: 8785 - DNA, 35126 bp, Homo sapiens
ccaaatctcatcttgaattataataatcaccatgtgtcaagggtggtgccaggtagagattattgaatcatgcgggcagtttcccctatcctattctggtaatagtgaataagtctcatgagatctgatggttttataaatgggagttccccgtacatggtctcttgcctgccaccatgtaagacgtcccttgctcttatgccatgattgtgaggcacccccagccatgtggagctgtgagtccattaaacctctttcctttataaattacccagtcttagatatgtctttatcagcagcaggagaacagactagcacagttatattttttaaacctgataaaatttactttaagacaaaaagcaccaccagagatagattggcaggcattcccggtgtgactcaacgtgtccaaattccctctttttctgaggacaccaccctaatggccaaattgcaacttaaccatcactttaaggaccttatctccaaatattattacattctgaggtaccagggattaaggcttccgattcatgaattttgtggggacacaatcaacctataattggtaattatagtaactcatggaaaatgctaatcttattagcttgaaaatcacagcagataagtaacagtcagtttttactattttatattatatgacaaaagtccccaagctccctgttgtttatagcacaaccttgtgtgtctgtggttccatggctctgttccatgtgtcttcttattctaggaacagatgagggaagagcttttagctgggattgccattcccacacaaaggggaaagagtggggaaaatgtggtgcatgattttaggagtttctgcttggaggtagcatacccatcactatcattactgcttacttggccaaagcaatcccgtggctcaacactaacacttaacaattggctattctgggcaggtgtggtggcccatgcctgtaatcccagaacattaggaagccgagactggaggattgctcgagcccgggagtttgagaccactctgggcaacatagtgagactccctccagcccaccccctgaccccatcccacccccacccatctttacaaaaaacttaaaagttagtcagacatggtaacacatgcctgtggtcccaactagtagagagggtgaggtgggagaactgcttgagcctgggcgatggaggctacagtgagctgtgatcacaccactgcactccggtctgggcgacagagcgagattctgtccccccaccctgcaaaaaaagccaaaaaaaattggctattccttcaacagggaagcactgcaagtcaatttcaacagctgtggctatagaatcccattacagagaagtaggaagcaattaactgacagcaataatataatcagccaccgcaaggtcatggatttacaggaatttgctattcatccacgttataaaagcaaagacaaaaaatgtgagtaacaaaatgtttgccatgcttgcaagagacaacaggagctattagcaaaatacatcgattaattttctactttaagattacttgttactagtgaaccagaaagcatgcaatagttgctgtctacgaagaggatttgcttgaaggtttatctaggactgattcaccaaaaagtatttaattataggttcagaaaacttaatgttttcagatacttagaaaatgtttgactgacaacaacacaaaatgagtaagatacaggataattaacagagccaacccttgctaaaacgatgaaagtgaactagccatccacctacccacctcctagccctaccccccaacttctcctcccatctctactcccagcctttattctctcctgacttcttctcaagtttagtgtcatttcctgccttctctaggcatgggcacagaccactccccaatctcttcttatcaaatgtgtcaggttgatttttgtttttgtttttgtttactttatattgaagtattggtacttgtgacccctcctagtctctgatcttccatactgccaaggtaacgactatcctaacttctaacaccatagatttgctttgcctgtttttgtatgtgttctttagtttctggtttctttcactcaacattagatttgtggtagtagattactcatccagctgatgtatagaagtccatcgtgtgaatataccacaatatatttacctattctacccttgatggacatttggatagattccagtttgacgctattatgaatggagtcactgtgaacattctagttcatgtctcttggggaacttaatttatagatttctttagattgaaacctaggactggaatggctgggtcggagggcatatggacatttagctataatcattttccaaagtggtgggaccatcctacagatgtttaataaggattcacattcattcataaaaacctgaatagtctgcacagtattttcaaaagaagcagatctagaacccagttctgattccaagcctagtgcattttccatccagtagattccaggttcttctatcctactttcttctcctcaatactatgctgccttttccctctaaagactcaagaatgaatagctagtcattcacggggcattctccccaaggtacttgttgccttaaagagggtcagtggtaactccaaagagctctaattgtgggactttcaggtttcataaaagatcaatctgtagaaaggaactagagaggagagagagggagataacttcagtcacaggaaagtacttaacagagtcaatcaaatccaagagggccattgatctgaatagagccatttgtgatgaaacacaatagaagataggaagctcatcttttatcatgtgaacctcagggcaaacatgctagaaagctattgaaccctggcctcctcaaattgatacacaggaacaaaagggaagcctcagatgtcaaattctcatgtctgcgcccaggcggccagaagcaggaaccggctcctggtttcttgagggtggcctgcatgtgagcccagggtgtgacaaaatgtagcagaaaagactgagaaggatgacgacgaaaatgaagctccagcctcctgactacccctctcaggtgtgcatctgtttccaattccgtattacaattaaagagaatgattttttattttttttaattttattattattttactttaagttttagggtacatgtgcacaatgtgcaggttagttacatatgtatacatgtgccatgctggtgtgctgcacccattaactcgtcatttagcattaggtatatctcctaaagctatccctcccccctccccccaccccacaacagtccccagagtgtgatgttccccttcctgtgtccatgtgatctcattgttcaattcccacctatgagtgagaatatgcggtgtttggttttttgttcttgcgatagtttactgagaatgatgatttccaatttcatccacgtccctacaaaggacatgaactcatcattttgtatggctgcatagtattccatggtgtatatgtgccacattttcttaatccagtctatcattgttggacatttgggctggttccaagtctttgctattgtgaatagtgctgccataaacttacgtgtgtatgtgtctttatagcagcatgatttatagtcctttgggtatatacccagtaaaatgggatggctgggtcaaatggtatttctagttctagatccctgaggaatcgccacactgacttccacaatggttgaactagtttacagtcccaccaacagtgtaaaagtgttcctatttctccacatcctctccagcacctgttgtttcctgagaatgatttttatatatttagatactttcagtgtctggatttgaatatagctgaagttaagggtactaattaattgtgaatcattccgatacttgaatataaaacctctcaagcctaatgtgcaaatttatgtaaaaacaatgtgaaattagaaatgcattggcacttttttttaagcagaactgtagcactctgtctagtcaaacagactgctcatttgcaagttgtctatatgcaaagcattctgcccctgggagcctaaaatctccttagaaagtcatctgaaatttgagaagagctttgttctgaacctgctttctgctcccttcacttttcttccctgcttccagcactgtgagcaaaaagcctaagtatggatcacacctggccaacccagaagcagccatggcccaaaacaggaggcctgccctgggaaacccatttgagttcaaaggagggtgtctaaatatgcttgtcttgagccctgtgcattgggccttgcactgcagccttccaactttaagagaaatttcagaatccaaatccttcccgcctgcagggctcaaattttcctttgcagatcagacctggtgaagaggctatttgccgttcaatcctaggctagctttctgcctttcacctaatgtttgaggttaagagaaatcagaaaagagagaccgtaaactgatcaccactgcatgggcatctgcctcacccacctttgggagttgggggaagagccagccacaggtgctcaggtgcaggtgcccaggtgtgagcggctaggtgcagatgctcaggtgtggcagcagggagtgcacttggctcatctgccctggggagggccagctcccracagaagtaggccagaggtcagtcccaggaaatgcttggagcagccagcagggtagggccaagtcatgatacacctaggagtgggaggggaggcctctttggatattacctggtttatcatttagctgttggggtggggaaggaggtgggaaagacagaaggctctcccaggaattggcaggcagccaggtcagggacaatggcagcccccacttgtgctagaaaggcaggcaggacgtgaccactcagatagccacatcaacaagtacaaatcacggttgccctggaaggaaatggctcaggtttttcccagtagctcaatgcctaggcacccccacctgtggtttgggcatttcactctattagctcttctgctcagtggcccattctgctagccacagctcacatttactccagttatgaaaaaggttaattttcccatattgagtttctctgcaaaagctgctttcagttgtgaccggtaagttccgttgtcaccaatatgggtacaactgttgtcactctgctattctgaagccatgatactaaaagtgtgaccccagatcagtgtcatcgccatcaactacaagcttgctagaaagaaaactctccctagacttccagaatcagaatttgcattttaacaaggcccccaggggaatcctgttcacactgagttttgagaagctctgttctaagatattactccaatccccagcaagccaaaccgaccactttcttcacataatcagaacgctcggttccagtatttccagataccagccataggaaaacacgttgttctctcatttccctttaaccttatctaaagcactcaatttcctcaacccttaagtcgtcatctgtaaaatgggagtgctaatcctacttaatttaagatgattaagttgaataataaattagaatttgtcctacaaattgtgaatcatgatcggaatattcaattttattattactctgtgtcctaactcaataactgggttataaactcctgaaaacaggacaatctcttctctacctctttctttatcttccctgtatactgaaatacagcgttctgcccagcatgaggtcgactatttgacatttacaaaaatctctcttggaatccccctgccaaaaaaaaaaaaatcgaatttcaatttatgactccaagcacaaagagatcctgtcactttgacctaattctctgaggttcatccctctaaataattgtattgtctccatctataaagtactctgttactatgacaacgcacacataattgcatgtgtaagtagttgagggtggctgtgcaagtcagactcctttccaccaggaaacacagaaaacattctatcttcccaaatgttactctctcagatttgcaccaagaccctagaagtttcttaaayttccatatactttatggacactacaaagcaattccaggaaacactgatacagtagcaaaactactgggagtggaaattggatggagatctgggtcccagttcagagtctgacacctgatttgcaacataattaggcacagggcactcaactattcagggccctaaacccttctattgaaagggaaatgggagaacaatatgtgttcctatggctcagtccctataagattctgtactattcagagttgattttaagtgtcacttaactgaaattatccaacaaaccttcatggcatgaaacattaacacrgctctttttatatggcatggttcctatggctcaatccctataagattctgtactattcagagttgattttaaaagtcacttaactgaaattatccaacaaaccctcgaggacattaaacattaacgtggctctttttatatggcatggttcattatcatgccaataaatgattaatcgtaactctctgtcttgaccaataattttgctggacttttgtgattcacaacgtgytctgtgttgtaatgctacctcttgaaactgacatcctagctttattgttttttattacttccctaaggtggctttcaaaagagacaccaagtgacatatttttaggaggggtttaaaagtttgatggggtagaagtaaacgttgcttaactcaaccagcagcagagccagggcccagggaccagcgcttctgtggacttggcctttcsagcagcagacccagcaatgaatgatccgaacagctgtgtggacaatgcaacagtttgctctggtgcatcctgtgtggtacctgagagcaatttcaataacatcctaagtgtggtcctaagtacggtgctgaccatcctgttggcyttggtgatgttctccatgggatgcaacgtggaaatcaagaaatttctagggcacataaagcggccgtggggcatttgtgttggcttcctctgtcagtttggaatcatgcccctcacaggattcatcctgtcggtggcctttgacatcctcccgctccaggccrtagtggtgctcattataggatgctgccctggaggaactgcctccaatatcttggcctattgggtcgatggcgacatggacctgaggtaagattatcyatacctctaactactgcaatcaccttggagtaatccttccagaagcctatggcattctgaatgtccaactgatttgccacgcatctaaagtatgacyaaggaatcaaacaggagagaataaatgcattcccgtgccttctagcacagctgcttagctattggaattgggggatttatattttgtgtttgtgtttttaaatctaactcagttaacagggagttgcataattgctgttgatctctaggaaaagattcaaagcttttttaaaaaagtaatcttttccaaaccacaagctgcagctgaggaggtttatcctgttggtagcaggaaaaaaaaagcaaaatacactttytttgtaatgatgaggagctctgggtgcaatcataaaataaaactgtttgtcaaacattagaacctgtagtgagacagtggtcaactccatcaaatatagccagttctttgggcaaacattttcctggtataaaacctaaggaagaatttgtaaatttgcttcacctctactggcattaaaagtgggggaaaaagcctatagcagcttttttaaaattatgcttaccttactacaaaataaacagaaaacgttttctccacttcctacagagtaatctaaattgcaatgtttgcccatttcatcccgtgccagtctgaactagcactggaaaaaaaaactaatagaaataagatgaagcattaatgtgactagattgagaaatttaatgctaaaagttgaatagacaaatgtctttttccttagctcacaattcctcatttcccttgaaaggtatgcatttccttctgcaaaccatccaggtgctaatgcaacgtgtgcttattaaatactgtacagtaggcaattagctctgttcatccccagctactattggcagaggagagaagcacaaagtgtagaattgtaaacactggattgatagagtacccagtgatcaattaggaacctgctgtctcatttcaactggtgctggtttctccagaagctttagaaaagtcatacaaaccctataccttcatatggyttagtctttcacataagaaaacacatgatatccaccttgcaattgctttttttttttaaggaaagccctataaaacaacataggatggcaagtgctattcaggtttagttaatctgtgaaccacgatatagcaataaggtctttttagacctcaatttagtttgacctggacacaggtacacagaagtgagaattctaaatgccagcacctgttacactgagaaaagtgaactacttggaacattgggccttgacccccaataaacagctttctcataatatttgtaacttttagtgcagaggagttttgtacctcaatgtaataccacatatggaacccttttataagacagaaaaaaaacgtgtgtggtactggactattaggttgttgaaatgaattctcttctgtgagctaaaaacagtaagatctaacctaaaagctccaagttacatttttctgtggttttaaggaaatcttatttctcttgaaacaggagatgattatgtaatcctgtccacctagcataacaattcctataaattattttttttaataagaactaaaagtagaatatgaagctttggtagaaacctccagctaaatccgtgcaaatgaatccttccagcaagtcaaaataagccctgtaacgcaacatggagcaacctcacctatccagagctcaacaagacccaataaaagacactgcacacccaaaataaatttcacttaatctcataaatgctcctcatgcgggaccgacttaactatttttattttaaagttctgttgtgctatttcccagaaataagaagcggggaaggaagcagagtgttaggaagggcaaaagagaagatcaaatgcctgcaaagcaaagcagacactgacaacacacagccatctctctatcatttatcctctatcacttattctctctatcacatattctctcttaattatcaattattctctctggtttctgtagcacttattccagtctctggtctctgtatcacttactcttctacaaacacaagaagatgtcacggtattttagaacaaccgataatcatgtttatcatgatcggtcttaatcattgagaagaggttaaattatactgctatgtaagatgatgacattatgcattgtgtgttaggaaaacaatattccaatatttctttaatacaaattaattaaaagggtaaaacctgagctattgcgtaacagttttccaaaactttttattcttctggattaagaactggataactaaagtctcctgataatttacttagatacaatcctatctaacatttatatttccagttgtgtacacttagaattttaccttctccatctccacttgaactccagcaatggcatgaagacatgactgtttatgttaacaggcagctacactaattgagctaatgccacacaatgccagcaaaaccattccacctggttttaactctcttggttatggttcttgggagaagaaaccaaaacatttctctctcactctgtcatctcttatgaacctggaaagccaccgcattttgcaatctctagtgactttgaaaaacaaaaaaaaaatagacaatagtccttgatcattggaatccagcaagtactatttcagctccttctctgaccactcccagcctggagtttgtgaatctgattggtgcacatatattttcacctaagttgcagctgtgccatggacatcacatgcacaaaaagcatcagggagaagagatggtgacttttcaggtgaatctgcttgtggccaaaacccatagttgagaggacacagaaacatcctatctcctttktgtctgctctctccccagacacaggcaaatatccggtgtcttcatccttcttaatggcctcagcgacaccatgcaaggacttctcatttcctttctttggcttcctctttggggaatccattcttatgcatccttctcccagttgcccccagttccttccctgccacctactttctacattcctttttattattttacagactttcctaccacatcctttgttctttgggcaaatgctgttagatttttcagcttccagtgcagcattcattgatattttagatattcaagaaatctcaccctgtagcttaccacaaattcacagcaatcaatccttcctatgtcaaccccataaatgtccttctcttctctactctgggagacctaacccaaaaccattcggctttttcctttattctccctaaaagtaaccaaacattgtttctctccagtagcactgattttactagctaatatttattaaacactagtatatgccatgcacagtgctaagtactcaaaataagttggtatatttcatcctcccaagaatcctctaaagttagtactattattttctgcatttggcagataatgaagttaagattcataaccttgaccaaggtcattgagtcaatgtatgcctgagtcagaattggaatcacccaggtctacccactaccactttgcaggctcataagctttctctacactgcttctatcacttttcacttctccagtttctagcactgcctatatacgctacgttagagccttcaaacttggtattttacttctaatatgattacaatcttttacattgcttaacactgatttcactgaattcctcaacattcactaaatttacatttattctttcttttatttccatacacacaaaagaaaatctccctggcagttaatagagctgaagtcaaaattaagaccaagattttttttttatttttcttatactttactcttttctgtcagtctaatataaattcaaggcagtgtatgtattttttatatacatgccttttatagaacttcagattttttcgtgtaagataatattttcttttgctaatttaggctyctatattatttcttaaaattcgttatctgtgaattgttttaaatctcattttgagtggtttgattttgttcttacattcattcaaatagcatcaacttccagctacctattcgtctgttcatctgcaaggtctcttcgtcagtgctgctcacaagtctaaacctttccttctccaaaccctcttttgtccctcatcacgatccttaagaaactgctctcaccaaactcaaaattatgatacaacgtcatagattgtcttagcaatattcagaattaaaggttttgcaaggatctttgaaaaaaaaacaaagacagaaaaagacttccttcttaaacattttctcacattttaaaacaaaaattctcagacttctcttcactggaacccagttaataaatcctcctcacttccccaccagattcccaccacactctagaaaaaaatattggatgcacagaaaaaaaaagtgattttattatagggacaactttaaatccattctaatatattttttaaaataaaataaaaaaaaagagaacactgaaagaagagaggaaggaacagagaaaaaaattaccttcaaactccagtactttcattataagtaggacaaagtactattaataacaaattaacttgtttgtctggtgtacaattctgccttagcatctatttcatgcctaaatttacctataaccagaatagattgaactgcttaaagttttaaatacatccacattatttgttactgttgtaatattttagctctactaaaacaagtatttttatctaaattatttaagcctattttaaatgaggtcattctggttaaaaataaatatattattagagaagttaagctctctgatgaactttgtcccaccctgtattttgccaaactgtgcaaatttaactgtgccttgaaacaaaatttctcattgttagctcctttcttagtatagtgtgttgttgttgttgttgttttggggggcaggtaatataaatatttaacattttctttcaagtacacccataatacccttaagaaattactactcttgacaacctcaatgacgacctgttgagagaagggcctttcagagaaatttctcatttctctaagtttccygattctatttggtggaacacaagatacaaaaacatggtaacataaatgatcacagcagagagatgcagggtgcggtggctcccgcctgtaatcccagcactttggaaggcctaggcgagcggatcacctgagcccaggagtttgagaccagcctggacaacatggtgaaacyccatctctacaaaaaatttaaaaattagcctggcatggtggctcatgcctgtattcccagctactcgggaggctgaggtgcaaagatcacttgagcccaggcttcagtgagccaagttggtgaccctgtactctggcctgggtgacagagagagaccctatttaaaaaaaaaaaaaaaaaaaaatggtagtagcaaccagctcttaatagagtgctttgcattggtctaagtgccggacaccattggctcattctatccttacagccattttagataaggaaactggtaaagagaagtcaactaaattactcaaattaacacactaagtggcaccgcctgctttcagcccagacagtgtgtggctttagagctcaggctttaaaggcagagaatgtacgctgtgtacagatcccttygaagaggacccggaagactcactccccaaaaatctttctttgacccactgtcctagtactagagatagcatcatttggcattaatgtctccatgtagatagcctactcagccagaccctcttattaaaatgcaaacactctgagcagggatgataccagacactagttcttctgaacacacatttgccarattgccaataacttactcagtgctaagaatttatgtctaccctgccgcttgcatgctttcttttgatttttaagtcagcttccgcttcttgtcccaagctagggtcacttgggcagtaatttttctgctttatggcaacacagcgaggcctcctccctcggacatgcattctattccaggggcccagggaggcccattccatctcagcatggtcagacacatgcagccttggtggtgtcagctgctttaaatgtgtttgctgttctttgattgaatgtttgaaggatggcacacccagcgaaccttatacattatttaatgatgactttaacccatcgtttaatactgtttctgacccttaagaataaaaggggagggaaggacggcacaaggcaaagtggaaagacaccaaatatggcccattttgctcaaggccaggccctgaatacactcaggcacataggcacatgtatattactgttcatcacaccagacgatgctacaggttgagacagattcttgcaggactttcttatcatgaatcgaaaataaaaattttctcccattcgggaggttgtttgtctactctgctkatagtttcctttgctgtgcagaagctctttagtttaattagattccaagaaaacaatgaacaaacccattaaaaagtgggcaaatgacatgaacggatgcttctcaaaagaagtcacacatgcagccaacaatcatatgaaaaaaagttcaacatcactgatcattagagaaatgcaaatcaaaaccacaatgaaatgccatatcacatcagtcagaatggctattattaaaaaggcaaaaattaacagatgctggcgaggttacagagaaaaaggaatacttatcttctgttggtgggagtgtaaattagttcatccattgcggaaagcagtgtggcaattcctcaaagacctaaaaacagaaatacactcaacccatcaatcccattactgggtatatacccaaaagaatacaaatcgttctattataaagacacatgcacacatatgtccaccgcagcactatttacaatggcatacatatggaatcaacctaattgcccatcaatgatagactggataaagaaaatgtggtacatacacaccatggaatactatgcagccataaaaatggactagatcaagtcttttgcaggaacatggatggagctggaggccattatccttagcaaagtaacacaaggacagaaaaccaaatactgcatgttctcacttataagtgggagctaaatgatgagaacgcatggacacatagaggggaacacagacactggggcctattagagggtggagggtgggaggaaagagaggatcaggaaacataactaatgggtactaggcttaatacctaggcaatgaaataatctgtacaacaaacccccatgacacaagttgacctatataacaaacatgcacrtatacccctaaacttaaaataaaagttaaattaaaaaataaaaataaaacagcatcttccctagaacaccacaggtggatgtatcaatctgcccattgcctttcagcgtcagcatgaccacatgctccacactgcttgccctcggaatgatgccrctgtgcctccttatctataccaaaatgtgggtcgactctgggagcatcrtaattccctatgataacataggtaagtcatccatctgtaagactgttgactgttaccctcaaaytctctgcttaccccctgctaggctctcagaccaggctcacacctgaccgttattgccctagtaggagtttttgcctgatttcattataaagtcacccctgcgtttggagagtgatggcagaatgtaaattccaaaccttgaccttatgggagaacctgtcttttcttcaatttgaatcaccagggaaaggagccccctccccagccctcagtctggactgaggaggcttaagctttggggacatgggagcttgcacctattccttaacccagagtgtcactagttaatggtcataggattttgcatccagacacttgaattgaagaaaytttttttttttttgagatggagtctcactctgccacccagcctggagtgcaggggcgtgatctcggctcactgcaaatttcaccccctgggttcaagcaattctcctgcctcagcctccctagtagctggaattacaagcatgcactaccacgcctggctaatttttgtatttttaatagggacggggtttctccatgttggtcaggctggtctcaaactcctgacctcaagtgatctgccggcctcagcctcccaaagtgggataacatgcatgagccaccacgcccagcctgaagaaattttttaaaatcacataatggtttcaaaatagagcactgagtaagcaatccagagtgttacaacagaaaactgctagacgaaacacactgtttctaacactcgactgtgagccacaycttgacccaaaagttgatttaatggcaaagtcatgctccaggagtcaaatttactagtaatgactctgtctcatttcaccctcatcccaaaaaccttattttctgtttctggggaaacaaattatagtgggagattaagttattgttgtaacttagggatgagggtcaaaggaagaacaagagagttcctggtataccaggaataggcatttcccacagaactatcacgaacaaaagacaagatgtgggcaaaatwgtaaatcagtaacaatcaccaggtacactatatgccccaaatacctgggtttttttccccactgaccttggaaaaaaatcccaatgagctgcctcagaaaggtgtgggtttcccattgaagaaagcatccaagcaaaggctaaatgataagccacctggatgcttgtaaaagggactcctattgggataggaagctgggctgaaatgccttccatttctgagaaagactgcttctgtgatttagggtgattgagggaatatacaactgaattagaataaactttgtgaatactaattggggatgatctktattacaatgtttgtagcctcttctctctctcctactcttaccattaccattagaccaaaaaaaaaattgtcctccttgacatgccctattcagtatgggyttttgatatacaagattcttcagactccaggagagaaccttaatatcatatataacctcctgacaagagactttagggtgaccctccactaccacctgcttttgccttcatgctgcttgactctctggctgctctgtcagcggacgccttccatagagctaaaaaccatagtttaygtgagtggtgaccattatatccctctcaaagaacctgtctgctgagtgaggaattttgattccacaatactcactgtaataatttaataatttaagccataaaatattctccttttgatatacattcccttctgagaaatgactcatggaaatactgaataattctaactgcagtgtgaatgacttataccatattctgtgatgtgaataaattttgaaataaggagaaaatgaaaaatcaattagcacttcaatggaggaaaaggtcatcataagaggtcaagagtgaaaagaaaagaaaaataggaaaagagaaaagaaaacggaaaaagagagaagtttgaaaaacaaagatattgttatatgtaaaatatttattcagaaacagaatacttgttcctcagtaccacaaggaaaaatgagcattcagacaaaaagttttctcagcaaggcaattttactttctgcagaaagagtgctcctcacagatggcacaatggtgacagcacacctgaacaatggagggaagtaattcrtatcccttatgcagcttgtccctgctactgtgtcctgtctccattggctggagccagacatcacaatctaagctaaaacctgactggctaataatttaaaacttttctaaataggtatrggcaatagacaacaaaggaaaagaggacrttgcttgtgaaaggacttagaaaagtaataatatttccaaataaggaaggggcataggctgcaagctggaatgtacctgtgagcatgttcagcataaatrtcttggttaaagtacaaggacatagaatgtacttattcctttatatctaacmgctacatagaatagggcttaacaaagagttactagcacaaagtaagggggcttgaagraagttagtctttaaaagaaatkattatttctaatgtttattattattattattttcctttaacaasaagggacactttgaagaggaaactttttactttctacagatattaaccctgctcaccatgtttgcccaggcctccaagctcacctttttgctgttggtttttctagttctttaacatagaaaataaatgaactgactgcttcacaagatgttatcactgctttctaaattgtggctcagggtgattatttgcccaaggtcaccaggaagctggaatagcccacagtctattctctacacagctctatgggcagacgtgtttggtacaacttcatgctccagtgattcagtaaacacctgtgagccccctcagatgctgacatctggatcgagaggaggcagaccatgcagctggtaccactaaaataaaaccactgctgcaaattgttgtacttactcctctctaccccacatttttaagtgtcttgtgccaagaagtttatagccatttcatcatttaattctcacaacagcactgtaaggcagacataactccacccattttacaaatgaggaaacaaaagctcagaggggttcaatgatttgcacagttcccacagtttgggaatacagaaaggttcagttccaaatctatctggctcccagtcccaccacatgaatccattcaccaccactctctttcattctcattcttctttctacctttctttcctctgatatctactgtgtaaacttgattaaagaccaagttatggattcaatgtgtaaccatgagtggwtgctttttcatctacatagacaggcactttacagagagaacatgggcatatraggcatacgtaaaacaaacagagcatggggaaagaaaagagcaagatcaccagcccactggagaycaaagttacaacatccacctctacaagcagaagccacacactgtgggtgtaaagaaaracagagtccctttcccagtcaaccccaggtccctgaaaaacttcatctggcctcatctggtcaggaaagaaaagcaattctgccatggatttcrgcaggtggtgctgcttatgtgttawcccgttggcttgggctgcctcaaaaagatgaatactcttagcaggaggggccaaacagattcagcacattaaaatataggaccaaaacctaaccacactaacattccaagcacaggacttgcagctagatttaagctaccacatcacaaacaagtcatatatccagatggttttaagacctacaaacttcaaaaacttaggcaatggtctaaagacccaggagagggagtttccttcttgtattcatctgttctctcattgctataaagaattacctgagactggataatttataaagaaaagaagtttagttggctcacagttccacagactgtacaggaagcatggcagggraggcctcaggaaacktacaatcatggcagaaggggaaggggaagcaggcagcttctacatggctggagcagaggaagagagcaaagaaggaggtgtgcacacttatagacaaccagatcacatgagaactcactatcacaagaacaacaagggggaagtctgccccccacaattcaatcacctcccaccaggcccctcctccaacagacccgtcctttagttgtaatcctccaactggggattataattcaacatgagatatgggtggggacagagagccaaaccatatcactcccaaaacagcaggatgcaaggatacccaaggggggtttttctggggcatctcagcagtacrtgtgtcaacgccactctttcacatctttttttccattattccctccttactccccctcatttatctttttttttcctactcttagtacccttagtcattatttaattctgctaagtaatttctgggcaaaagtcatcactgacccttatattgccaggagggctagaagactacaaggaaattatgttttcatcattattgcattcactttaaattaatatctatagccttggattccagaatctgttttctagtcctagttcaatctacctagttaatcaatactaagcaacatccactctcagaatttcaccgttcaatatcactttcttatactgctttaaaaggatgtttgaaaaagaaacaacctatgaaaagttagaagttgttggtgctaaattatatgaaatcagctattggamaaatgagtgttaaataacatggagaaacaaaccacatgtcgcaaaaacagcagtaaatttaacatggtgaaattgaagtatgactcttttatctggccaggtgagcatgttactgcaaagaactataattacatgagagttcgtcaaatatattatctcatggaaaatttaaagcacgctttctcaacttttgttctcacctctctgctgtaaatttgaatagctaaagctagttttaaccaaaagtcagatgtcagaatacctggtgatcttgagctaattttggacattttctttcattttaaaatattttaaaattattttttatttctactaccatgaactagcagacaaatgtaaaatgtcatctttgtatgccatacacacacacacacacacacacacacacacacacacaccttggtgagctatttttcctagagatataaagatccaaagactaaagaagccaagattctgacaaattaaaactaaygtatgctggcaaaataagaaactctaaaaaattaatgcagaatttagtgaaagaatttacagcattgatattatcaattatctaccaataatattaaattatttactggagtgggtgaagaagttgagtgagtgtgtgtgtgcatgtgtgtgtgtgtaattctgtattctgttttgtgtattcaagaaggaagactgaaataccacctaatctttcttcaggctgcttgttcttctgtttttctctttcctgtgtcacctgttctgctgatcacattgcccttctgtcatctttaggtacatctytggttkctctcgttgttcctgtttccattggaatgtttgttaatcacaaatggccccaaaaagcaaagatcatacttaaagtaagtatcccagttcacaccattaaatattccactgtgacaatcaaaaccatagggttttccatccatgaaatggtttcattctcattatatgattactgttgagtgggggcctgaagtcattagccatgcagtcttctcytttagaatgtccttctttatatgtgtgtagagagagagaggtgggatctcactatgttgctaatgctgttcttgaactcctgtgctcaagtgatccttccaaagtgctgggattacaggtatgagacactgcgcccagcctagcatgcccttctttattgcagtcacaggaaaaatttctacccattctttaagacactccactgaactatcacctcttggktttactctattctgtcctcagggcatattactgttatctctgttatgtgagtttgtgttatacaatatatctaaatggctttcttagaaaatagaacatatctttcttatgtctgtatscayatggccatttcattgcctggcaatcccattcactaactatattctagctagatgatctggatatgtatgtagataatatagatagattctgctgctcggggcaaagtaagtccattgtattccttgcttctcttgacaaaaaatgtttataatctccaaattttgttttaaatgtgaaaaggagaaaaaaataacaacagtggttttcatttgcttataccttttttaaagttgtatagagttctatacccattttctcattatcgtaacaatcataaagggaagctggggcgacattttatccccaattacaaataaagaaactacagttcagaaagttcctgatttactgaaggaaacagaataggagtagttgaatcyggaagccaaatcttccaggctgtcatygaaatgggttgtctttttgttctgacaaggataattttcaagtcagaaaatcttcagactaattgcaaatggttgckacatgtcctattgtgttcttaaagcttaaagcatgggacaagcgtcagtatttccagtgggctgattgcagcctcctggcttggagtacatagaaagacaactttatcatcacttcccccagggacaaggagactgctgaggttttgtctctgacaaacatacttggatttgctttgactcatgattgctgggttcacttattcctttttttttcagattgggtccatcgcgggcgccatcctcattgtgctcatagctgtggttggaggaatattgtaccaaagcgcctggatcattgctcccaaactgtggattataggaacaatatttcctgtggcgggttactccctggggtttcttctggctagaattgctggtctaccctggtacaggtatggcatttagtaaatcacattgggrattttaatctgtaatatctgttgtattcctttgctagaggtgccataagacagaaccacaaactgagtggcttaaacaacagacacttattgtctcayggtttcagagactagaagtgaaaatgaaggtgtcactgaattgattctttctaagggctatgatggagggatcccttactggccttcctcgtggcttgcagacatccatcttcttcctgtgtctttcctcagtgcacctctctgtggcctggctccccttttgataaggacaccagtcattggataagggcctcctctaatgaactcatcttaactaattatatctgcaatgaccctgttcccacataatgtcacatcctgaggtgcggagtgttaggacttcaacatatgaatttgggggaaagggagacataatcaayccataacagctgcaaacactgaagacaggatcaaaatccttagcccttcatcaatcacattcatcctatttctgaatatgtcattctaaataggcccattcattcygaagtcatgcaagtccccagaaagaaaatactgactgcctcttttttgctcaaagtcttctggaccattcggcttacaaggcagatggggctcttccattgctaagtattcttattctctgagtggaatgacattaatgaaagcagttgggctgccttggaatagacaagcgttcctccagctggcagcagggtgagctcatcctccaaaggcgccgaatattaaaatgggtttcacacttctggatttggtaccgggcaaaaacaattctttttgactaatccatcgaatccacaggcagagagaacacaggtgtagggacagatgcatgtatgaagttgggaaagagaggagtgggtatgggcagcaagaagagcgcagtgtttgagtcaggcagacctgggcttgccttccaatccgaccacacactgcccgggggacctcaggcccagcattcactctttctctgagttttatcatctgtagaatggggacaataatttctaccttatagactttctgtcaagatttaaacacaacaattttttatttttatgagacagggtctcattctgtcgcccaggctggagtccagtggcacaatcatagctcactgaagccttggctcaagtgatcctcctgccttagcctcccgaggagctgggactacaagcccacaccaccttgcctggctaatttttttgttttgttttgttgttttagaaacagggtctcattatgtggcccagtctggtcttgaactcctggacacctgggctcaagaaatcctcccacttcagcctcccaaagtgctgagattactggtgtgagccacctgtttagcccagcctaaacaaaacaaattaaacaataaaacagcgacaacaaataccatatcttgagcattttctgagctgctgccctgtgctctacactgttaccaaaatcataattgaaaagggtgaaatgaaccctcttggccacttacctaacactgtggtaaatgagccaactcttcatatgcacatattaaatatatttatttatattatatacaataggtgagatgatgtataatatacattaataagtattacacttattccatagaaagttatatattgaataagcctatcttaaatacatgcattaaaagcagagacataatgcatatatatgtacttattattatatctgcttttcatgtttcacaataacaaaactactaaaacatgtgctctcttaacatcttctttaggtgccgaacggttgcttttgaaacggggatgcagaacacgcagctatgttccaccatcgttcagctctccttcactcctgaggagctcaatgtcgtattcaccttcycgctcatctacagcattttccagctcgcctttgccgcaatattcttaggatgtaaggaatcatgccaatcccatttcatgataatctttgaaaaatcctggagttgctaaaacaacatttttttaaaactccccgttcctggtggtgaattgtacaaatatatgagaggaaaaagccaccgtcatattatcatgactttccaattgctgatgaaaagatggtagttttaccaaaagattctagcaaagattatttttgagtgaaaagtaatggaggccgattctctccaatgactttcttttcctcagtaataaggaaggcagaggaacctgttgggaccattttattgtgcgccttctggcattcgcccaggaactcaggatttggtgatctttttcaaaacattgtcttgatatgctttataaatataggatatttatcagaaaactggtatacaaagaaaatttaccaggctaacttacaaggaagatgtgtgtgtgcatatgtgtatatgcatgtatatatatattttaaatacccatataattgaagtggttgaagcaaaaatgttccttatgtaaagtactaggtgtagtttaagtaattcttacttctcctgtcctgtggcatgaagctcccagcgtttcccatcaggccccaccgcccactggccttcacctagttgaaaattctttctacattttcctttccaagggctgataatatttaacctctatttttacattctattttttttaataaaaaagctagtttttaaagcctcatgacattgtaatgaggaatataaagtgaaggcacgcaasaaaactaatgtaaatgttaggtcacaaaatgtccagagatatagtttggttttgtttggttttgcttttctctctctctctcttttctttttttcttttcttttctttttttttcttttttttttgagacagcccctcactctgtcgtccaggcaggattgcagtggtgtgatctctgctcactgcaagctctgcctcctgggttcacgccattctcccacctcagcctcccaagtagctgggactacaggtgcccgccaccacgacaggctaattttgtttttgtatttttagtagagacggggttccgaggcgggcagatcatgaggtcaggagatcgagaccatcctggctaacacggtgaaaccccatctctactaaaaatatggttttgctttacttttctgcttagcttcatcagctcttcaacttgccctgtgatgctgatctcctctgcactactgtcttgaatgtcattctcaaagcagaggcttcctttccagaacagaatactctgaatccactgaaaacattccatggatttatcactgctccaggaagcaggagtccaggcctaattaccttgttttctgtataataacgttgtttgatctgcccaatttggcacacagtgggatttttccaaataattacttaatgatgtctactagataagccagagaaagtggactggttgatagaacaattaagtaatgcactagttgaacactaaccccaaagaggttgattaataaaaaattaagttgaaggaatgaggaaaagggagcactcaactcggtcttgaaatttcccagttacatcagtatgtataaaaataagggaggaatctttgttaagtgtatacaatacctggaaacatattttggtggtaaggctaggattctaaatttttttttggaaaaaggagaggaggggaagaaagaaaaagggaaaaaaggaaggatgggggagggagagagggagggagggagggaggaaggcagggagagaagggagggaaagaaaaagggataaacaagaggtatagtttggttaaatgaaatcattggcataagtttaagctgagggactctcagctcaaaacagtttataataagtggcggatcttcaaattgaccacaagctcaattaaattcaatagtgtggttcagtggctttgaaaataatatatgactagaagttcagggaccaatctaaaggaaatattgatcttgagttaataagatctttgaagcaagtcattatctctctcagctgtgtatcataatgaacgttaacatttattgagcatttactattcttcacagaccatgttaggcatttaattttatctcatttaatgttcacaattgccctatgaggtagctaatattattatggccattttatatgtgaggtattagaattcgaggggtcctataaggagtattttctgtcctcctcttgcctttgtgaccaattgagaagtagaagaaaaatcagatattcagataacagaatagcactttaactatggataaaacttaattggaaaacatgacttgaatctgcaaccaaatgggcttgttgaaaccaccctttcctccactgcctcacacatgtgcagacatgtactcacacatgcatagacaytgcaggtcttgcctcgcagggcagagcctaccctgatgagctgacattaaaaataagctgagaaatgcttgctatcagagaccagcagctccacagaaaagaggaatkctgatcacccatcagccgagtctcttctctccgggggaaagattgaatgaaggcagggagggaatgggaacgttgttctagttcaagtccttctacagaggaccatcaaacccatgtcctggaggttgcactgcaccatgtgtatatttattaagaactagcacattaactgggatatggcggtacagaataaatcctccctattgttcttatcattgttgagtaccacgtgcagggctgaatgcctgaagaagcttgtggctgccctgagcaaatgtctcctaaagatttatgctaggtcttcctgaagtgcagtcatccctctcgccatgaktagccatagaactaagaatggtgatttctttctctaagcagcctccagtctacagaaaatgtgatctgccatgtgaatcataggttataatctctatgcaaagtaattttgcagtttattattataaaatttacttaactrtctgtgtattgttttctagtttatgtggcatacaagaaatgtcatggaaaaaacaaggcagaaattccagagagcaaagaaaatggaacggagccagagtcatcgttttataaggcaaatggaggatttcaacctgacgaaaagtagacatcaagtggacaaaacagacgagttccaaattacgttcttaaaccgtaactatatttaattatttgttttggtaggacagttggcagaaaagagttaaagtgaaaattggaatttcaytggaattcatgtattggtttcagtaccaagtgactggtggcccaattctttaatgggacaaatattgtttcctatatatatgtrtatgttttatatatgtatgtatactcatatagatatattgtcattgaaatattcccccaaaatattctcagactaaacctgacatagggaacaccgagaatgaaaacatckttaacaccaaaactgaattcttatgcagaatttcctagcccatagatgacaacctgastttctgtatgttaaagtagatgtaatgaattattattattacagtggtcacgattttcttcagtgtttatgattataaaaattgacatgaacatctttcactgacattttaatcattattttaaaagctttgcaacctatatatttatataactttgtaatataacatgggcaaatatctgacttctgtatttttaaaaagttgccttctccagtggcagtccaaaagcagaaatgagaggaaattattacaaaatagaattcaataaccatattggatgcaggctcttaactcagcagggatatcgtacatctattgctctacctcaggggtccagtgatacccactagatcttccaaggaaaaacataattctttcaaayggtgtgtatttggcaaagagctcttcaaatctgggagagggacttcctcaaggttttcctgtgtgcagtggatccacatagctaatatgacagctagtcagttgacagggaccacccacagtaagcaccatggtcagggaggtggcaggaggtgcaaagacagaagtattgagagaaacaccaagactctagtggaggaattaattcaatgggagatagtataaaatacatagaaaacacaagtaacagaaacctggttgaaatgctwractagagtcaattagatgtgcaggagtaagtagtataagaagaatcaagtccgagagtgatcaggaaatgagtattaaacagtatttgaaacagagaacgtgtcccagggcccaaaagtcagaagggccccaccagccaggaaagttgtttcaatgctgtaagtaggtgtagccaagggaagccaggactatctgatatacggtagcaggggtttacggctgccaggggaaaataactcatcaagtgttggactttcaattataagatcgaatttaatttcctttccctcattctgcagcaatcagaatacacaatcttaaccactcggtccttagtggttttgttccattttgcattgggtattttcactgcctcatagagtctatttcaagtgttttggctgaaagggctttttgcatttgcatgttctgagttcagattctgctggtgcacccaagcattatgggaacrggaactcaacttagctcttccagtagaggggtgagggattctgcttttcaaattcataacattgatctttttatgcaagatttccatttacagttgaataagtacttcatatttttccatcattagacaaatacaaaatggactaaataattttaagagatagtggaggagagggggtacagacttccttcttagagagtgtcagagaatatgctcccaatggtggaaaggaagatttacagtctagcggctaagtacctcctacacatttcccatcaatcagaaaatagacaggtacactaaagggaccctgagaactcctcttgtaatttcaacacacccaaaatcaagggcctggatgccagcagctgcagcaagcaggtttttcctccctgttgagcaagacaggtgagcaagataggacttggctttcttacatgatgcggtaacttgtgacttgagtctttttccctaatttgctagtgggaagaaaaatagctgagctttctaaaatgatagctctctatttttaaatgaatttgaaaagtcgattaaattatgtattttattgcctctgagtatcatattaaatgaatattttattttaaaggcttaaataaatgaaaatgatttttgtaatgtttggtctagttgaatctttgtgacttgtgtcaagattttctcactgctcagttctagagatacaaataaggtggagtttctcagatattaaattgttctttgaaaggtgcctgaaagaaactcttaattaaacactctcataattcggtctcccactgatactgactgggattttcctccagaaaatcatacagggggaacattaattaaatactcttaaaaatagtttgacaatgatagctgatttaaaataataatgaaagtatttcatgaacttacaaatgaagccaccatcttctacgaaatggtgatgtatatacatatatatacacgtgtgtgtatatttacacacatacacaatgatagcctatttaaaataataaaagtatttcacgaacttacaaataaagctttcacctcctacaaaatggtgataaatgatatatgtatattatacatatgacatatatataatattatatatgtcacatatattatacatatgacatatattatatatatgtcatatgtataatatacacatacacacacaaagaattatggagctcttgcattaaaatctctcataaatgagacttgaagaaattcaggtcatcaacctcatttgactcctcctcaaagacatcattctcttttcaatctaggaaactctcactctcttccagtaggaaacaatttatctccttggaatatttggtatcccattgcttctcaatccttcaccttttcaaaaaccacataagtttagaacaaccgtcttcaaactgtggtgtggttacccctgggagttcatgaaattgttcaaagggtatgcaggcatggttagggagtaagtttccatttcttcaacttccagatgtataccttccccaaactgccctgcctgaaatgcccagtgtttgagttgtcctgggttctccatgtccacctcctctctcatggtcaggccttattctcaggcctaatcttactatggtacattggtcaagggtaggaacactttttaacaccaagcaaacaattcaaaatattggtatctgagaaaagcttatctttcccaatcgtatagatatgtatttaatgatttagaaatgaagtatgtgggcccatgttggaatatttgtataggtatgtatttcatgatttagaaatgaagtatttgggcttgtgttggaacattttgaatatataaatattataaagtggtctaggggagaagacaattttccattaacatgccagcacttccatcccaatatttacccacaaaagccatcacccttgagagtaaaactgtgagagcaaacaaaggagcactggttagagacattgaaagaggacacagggttttttttcctccaagagataccaaactataacaaatgtctgagccttatctatctttcttaagttggaattcagatgtgaaatggtcaacacagaggcccatgtcgctatattgttaagattgaaaagagaagtcaaaaaaatttttctgacaaaaagtctgatgtaattgactggtttctctgctaattaagaaatataaaagacatttcttgtaaattacatgagctcgatctgcagctctaaggtttaaaaaatatatttaaaacatatgaaaagcacattataaaataattgatctaaaatatataaagaactcttgaaactcaataataagaagtcaaggaacccaactgaaaaataagcagaagaatttgaatagacacttcagcaaaaaatggtactaaaagcaaataagcacatggcaatgggaggtacattcatgagaagatactcaacacgacaatattagataaatccaaattaaaaccacaataaggtaccactgcatgctcaataaaataactaaaaagaaaaaagtgctgacaataacaagtgttgacaagaatgtagattgctaagcggtacaaccaccttcgaaaacgtgttgcagcttctcataaacctacactaaccatgggacccagcagtctccctcctaggtatttacccaaggtaaccagaagtgaaagggtgacagaaagccaatcaggcatcaagcatctggggaggcaattactgcaaaaagatatgatgtaccatgtggaagtgacagaaatgttctatatcataactttggtggtggatccacaactttatacatttgtccaaattcacagaactgtacttttgaaattagtgactcttattctatgtaaatgttattataataaagctgatcaaatatttttttgcccaagatgtagcaggaaatgtatctaatatttttatcttctccacccttttgtgagaatagagttaaatgtggagactgtaagtggaagaataacagagtctagagctcttagatacatcttgcaatgcctttggtagcacactttccagaaattgagatgkcaaatgacttcagttcaagaaacattttgaaagatgggtaattccaattctttactttcaagaaaactggaagaggatcccatcaagttgttaatccttgtattttaaaaaagttttgctgatagaccactatgtggtattgtttttgcgtgtaacttggaaatttgagggacaatatataccaaaaatcctctcgttatcatcttcctttttatgtaaacaaggtttataagcacttaaacccataaaaaagaggcacaaaatagttgttgctgtgtctcagtctaacgataacaggacagtgtatattgcattccaggctttcgtctaagttctttacacatgtgaactcatttagtcctcacaatcactctgtgggatatgtaatatttctcccacttttacaattgagggaacttaggcacagaatgattaagtaactttcccaatgtcacttagctggcaaagggtgaaacttgaactccagaagtttagctgkatattctgttctgttgaccacagcactcaagtacataatatttatccaaaaatacacagtgtcaaaattctcataaatacatcacattagaataaaattctataatggaaaaaggattacataagttcaagtcaaaagaaaaacaatgtaaaattctcaaaaacgaaggcagaacttctcattttttaaaaatcagtaataaatatctatgaggtgtgtagatttcaatggatatatttaaaagtgatgtatcactttaattttaaattttcatttttaccaaattgtattttcagcttttgtcagaaattgaacttgtaattatttaaccttatgataacaaatgttaaatatcaactaagaatgtataaagtatacatcagttttaaaaattgtttggagttatataatcaagtttcttttttttctaaattccagtggtttgaccttctattaatttgctaagtggtacatttaaaaacctgttcggtgttataaagctggtagagaaaaattaattctaagaaatcatcattgcctttgctgggaataagtacacgccaacaaatatacatgtaagtaataagagagacagtatcattatttaaaattaaaaatagtagtttaggatgtttaagtacaaagattacttacatgtcaaaccagcagggttttcagctgcttgattgatttatacaatataagtcaattcttaagtcattgtggttactgttctcaaatcagaagaattttaaaagaatagctttgaaaaataacaaatatgattctgtccttttgctactgggacataatgactctttcatgcctcatggcataagaaacataaggctaagtcttctaagctgtatcactaatgtcaatcctttaaaggagtcagtgaagacaatacagacattcattaagaacaaaatgagacagagaaggaaaagggttatgaaatcacgttaagtgaaaaaagcaaattggtaattaattatatttatattgcaatccttgcaaatgatagggaataaaaaggaggggaaacattaaagggttttttaaggaaatgagaccatgaggttgctttttcaatattttcctttactatcatatgatatatgagacaacaaaatcaagagaaagaaatattaaaagtggcttcaagggttaacatggcttccccggggtcaatgtacaggtctggtgagtatggatggagtggagagaaatgaacctctccattggtcttgcagtttctgccatttgtaccttcttccttcccactggccctaagaatctctgcccctcaccagtaaggcacaggcttttcaggtgtagcagatactattgtctggttaacccagcactcatttccaaccccctctccgattcccacctcaactaaaaactcacatgtcaaccttcatttgcagctaggtagccatgtgacacctttctagacaattacatagaagcagaaatctcttcaggaagattctagcaaagcctttggtaattttttgttgatgttgctatcgaggtaatagagacacctgtcattgacccttctcccacctcctgctgccttaaagacaaagggttgcctggtactgcaacagcgactatagaacagcacagaaccagctctagcagtgttgagccactgaagcaaagccaatagctgccagcctgtaaacttgacacctaagcaaaacaaacacctacttacttaatctgttgttacccagatatgttatcacttgcagctggaaggattcctaatttatagacctgaggatccctgtcactggaattgccttaggtataaggtactcacaaaaatgcctgaggaatcagtgatggtgaacaacagaaaacttaaaaggctaacaggaatatcaaggcagtctctccatacagcatttggcttggggcacaataaggtggaaagttccataaagacaatgactataacatttgatttgccatatctctcattatcacaaaggaaacttattgcctacttatattcatattggctctgaatcggaatatttaaaacgttgctcatttccaagccaaaagaatcttccccatagacttaaatttaaaagtaataaacatagaagttgcagagatagagaataaaaattacttgttaaatttccaaatagttactgccaagctatgtgttaaaaatatttcatttgtacacagtgcaattataatgatttttattaattctccaccagaccattacaaatttctttaaaggataattacactatttatttgcagtaataaaaataaagtcctgccatatagcaattaggtggggatagagggcagaaaacaaaataaaaattatgtaattctaatgtgtagtgatggtttttaaagcttttgaatacatatttattacattgggcttccaactgcacatagaatcatcactcataccatcctaagacttttgagtaaatatgcattaggcgagttttaagcactcattattaactcagtcaaccagaacaaattcattaactgtaagcttatctagtttatcaagtgaatctagactgagttcatgggaatgtacttaaactttaaatatttattcgttagaccttgctagaatcctagagtaatatattcattatgccagggatttttaatgtgctgtgtcaaattatgttctcccaaatgctcaagtgatataattaactttatagcctgggtgttaattcttatgatataaaggaccatgaatgaatcaccagcattgcagggctttgctgcctttggtcacgagatcccccatatgttgtctcttccaacattttcagctctcgcctctctgctcgtactaggatatttgatttctttcttcttcgcctgaaaagtctactgttgaactgagaaattccctcaagccaaacactgatacctcccccaggacgtatcttattgatactcaataaggtcctgtgcttaaagttgccgctaaatccagcctcccttcaaaagaatctctcacctccctaggg

SEQ ID NO: 8786 - DNA, 59110 bp, Homo sapiens
  misc_feature (1)...(59110): n = A,T,C or G, or insertion/deletion polymorphism (see Tables 1-2)
tatagcttaagttaaatgaataaatctcacagggagtaaaataaacttagatgtttaaagaaggtagataatgagaaacaaagggtatgctcatgatctcccaaggcgcaatagttgtaagtatggatgggctgtgaaactgagccaacatctggtgaggtagtcataggctctggtaagttgaaaataaatgaacatggaaagaaaaatacagtaaacatgacaaagttgtcaatgcaaacatgtaatcaataaatggtcatatttaaaaatataacagcccctagaaaagagagttgatgtcttttataatattttttatttgtaaaagtaatactttcttggtttgaaaaaaattatagaaatatatgaagcaaaaagtacatgttctcatccctctgcctctgtgcctcaatcatttccccaaggtaggtatttttttggtgtgtacccttctagatattttctgcaaaattttctattatgcatgtatgtctccatgtatctcttctctatatctatatctatatctcaaagaaatatagaaaatactatctttttttttagtcagtgtgtcactctgtcacccagggtggaatgctgtggtgcaatcatagctcactgcagcctcagcctcctggcatcaagcaatcctcctgcctcagcctcctaaactgctgggattacaggcatgagccaccatacctggccaggaaatatttttgaacagctgatgttcttaggcgatgaaggtatgtgtggaagacacctgatgaaaggccttggtaacaagtactttaaggaagaaaattaaacatctattgaatccttattaccaccatcaccattttacactttatagagcacttccatgagatgatctcatctgagtctcgtaacagtccttaaggtaggtaagaattattattttcattgacaaatgatgaagctgctgcctgaaatgattaaaagataatgctcaaggacattccaaatccttattttcaccaaatcaaggaaaagacaatggaaaagttagtgttgtattggcctgggcatccctttgattacagtcatttaaaacagatttttttttttttaatcatggaaactttcaaacacgtaaaagtagagagaatagtcaaatgaatctttaagtaccactgttcaacttccacagttattttttttaatttttttaaaattatactttaagttctaggtttaatgtgcaggtttgttacatatgtatatatgtgccatgttggtgtgctgtacccattaactcgtcatttacattaggtatatcccctactgctatccctcccccctccccccaccccacaacaggcccaggagtgtgatgttccccttcctgtgtccatgtgttctcattgttcagttcccacctatgagtgagaacatgtggtgtttggttttttgtccttgcgatagtttgctgagaatgatggtttccagcttcatccatgtccctacaaaagacatgaactcatccttttttatggctgcatagtattccatggtgtatatgtgccacattttcttaatccagtctatcattgatggatatttgggttggttccaagtctttgctattgtgaatagtgccgcaataaacatacatgtgcatgtgtctttatagcagcatgatttataatcctttgggtatatacccagtaatgggatggctgggtcaaatggtatttctagtttagatccttgaggaattgccacactgtcttccacaatggttgaactagtttacagtcccaccaacagtgtgaaagtgttcctatttctccacatgctctctagcacctgttgtttcctgactttttaatgattgccattctaactggtgtgagatggtatctcattgtggttttgatttgcatttctctgatgaccagtgatgatgagcattttctcatgtgtctgttggctgcataaatgtcttcttttgagaagtgtctgttcatgtcctttgcccactttttgatgcgattgtttgtttttttcttgtaaatttgtttgagttctttgcagattctggatattagccctttgtcagatgagtagattgcaaaaattttctcccattctgtaggttgtctgttcactctgatggtagtttcttttgctgtgcagaagctctttagtttaatgagatcccatttgtcaattttggcttttgttgccattgcttttggtgttttagtcatgaagtccttgcccatgcctatgtcctgaatggtattgcctaggttttcttctagggtttttatggttttaggtctgacatttaagtctttaatccatcttgaattaatttttgtataaggtgtaaggaagggatccagtttcagctttctacatatggctagccagttttcccagcaccatttattaaatagggaatcctttccccattgcttgtttctgtcaggtttgttgaagatcagatggttgtagatgtgtggtattatttctgcatgttctgttctgttccattggtctatatctctgttttggtaccagtaccatgctgttttggttactgtagccttgtagtatagtttgaagtcaggtagcatgatgcctccagctttgttcttttggcttagatttgtcttggcaattcaggctcttttttggttccatatgaactttaaagtagttttttccaattctgtgaagaaagtcattggtagcttgatggggatggtattgaatctacaaattaccttgggcagtatggccattttcacgatattgattcttcctatccatgaacatggaatgttcttccatttgtttgtgtcctcttttatttcattgagcaatggtttgtagttcttcttgaagaggtccttcacatcccctgtaagttggattcctgggtattttattctctttgaagcaattgaacttccacagttattaacctttgacaaatcttcatataacttgttaagacatggagtccaaaatactgttggtaatgtaaccaaatttggagatcatggagagtaatttatgcagtgtgctttgagtatgaacaatgtatattctgtatgtacaagcccagaaaagtagctggagacaagaagtgcttaaagattaaattaaatttgtcttgggtgaggctattacaatgattcctcatttaagctcatcttgacattattttcaccatcgtaaccccagttcctggttcaatgcctagcatatagtaggtgctcaaaaactgttgaatgaatgagcctgcttagcagtttagatctcagcagcatgaagaagcccatgcattgtagtataagcaacctttgcagaatgtttcttaatgtgtatctggtgctttctatgtccaagatctttactagctgtgttggggcctactccaagtgccttacatgcagtaactcctttaattcttgtaagaaccctatgaagaaggtactattataattttttttgtgtttcatagataagttacttgtaagttggtaaagatcacacagatcataagcggtagatctgggaataaaatccagagtctgtgcacttagctactactctgctgtggcatctgaatagcatctatggaacactcaacacatttggggcactttgctaggtgccttactgttgggttaactcacaaaagtcactcctttgcaatgccagataacgagagggtgctgcacatggaacagcctttctttctttcttttctatcttttttttttttaacagactttgccattttttttgtgaacctaaggcacttctaagtgctgtgtgggagggaatgtggtagactgatttcattgagactctgccaaattctggtcttgcggccatcaaagacgcatcatttcctccaagacttctaaagggggctattaccacgggcctgcaggttctggtttgcattcagaggagacactatcttcttaaatgagacatggaagaggaagtgtcatgaactgtaaataaggctgatagggaattgtttggtgatggggatggagaaaaactgccctctccaaaccaggttccatctcccacccctttatccaactttgccagagtccatcctattttatttgctgagtttactagcaggaagagaggagtttctttaaagattctctcccctccccaaataaatacctcccagataaatatgagtacatctatatagtagagcactatgccaacattgaaaagatggaaggatggagctttgttcgcagccagcttaggcaacatagtgagaccctgcctctatataaaaataaataaataaataaataaataaataaataaataaataaataaaagatggagctttaaaggttgatgtagaacgaatctccagtgtatattataaagtgaaggctgggcagggtggctcgtgcttgtaatcccagcactttgggagactgaggcaggaggatggactgagtccaggcattggagaccagcctgggcaacatagtgagaccttgtctcaaataaataaatcaaatttaaagggaaaaaagccaaggctcaaatagcatttataccaagcaattgtgggaagagaagggtgacatgtctacatacttgtgtttaagaatctgcttggaaaaaaaaggaaacataaaaatgcctctgccaaaagaaaagtcttttcactctaagcctttttgtgtttttccaaaatttttttttgccatatacattcattatatttcagcattaaaatatttcacctgtcaacttggaaaagtaaaagcgtgaatacagtaaatatttaaaaacagatgaagataagtaacaggttacattaattgtatacaatcaatctagtttgaattaggtgtagatataataattctgtgtgtttatcttggtgaagaatggtcctttaggttgtcattaaaaagcacctctgggaggtaaaagacataggcatctggaagattcatatttaatgaagttaggggacatttgatgtcactccccaggtgtggggagatatggacagaaaaccagaaggaacgaatgtggtcaggaaggaattggagttcccctccaaacagctgccacaagaagtccacacacgtggagacagttgtgcaatttggtcacagagtgtcctaggtgcttttgcttcattgctcctccactgaagcacgctggcagctggcctccttcccctgggcctaaggatatcttggctggaagctctgctctgaaaaggggcatggccaaactttcactagggctcttcgttggggagcacgatggacaaaagccttcttggggctaggcaggtcacttcaaacttggagccgccaaatattttgggaaatagcgggaatgttggcgaactgggcaagtgcgttttctgattaagagcaaccagattcagctttttaaactacaattatactggccaaacaaaatacccttatacaaaaaccaaaactactggcaggagtcgctgccagcttgcgacccggcatacttggctgagtatccgcttctcccttgtggctccaaactgctgcagattctcggccacttcagacgcgcgcgatggcgaagagggtcctgcactttgacgcgcctggtgagggagcgctgctcttcgcagcgctcctggtgatgctccccaaatttcggggaccggcaagcgattaaatcttggagttgctcagcgcccgttaccgagtactttttatttacaccagaaacaaagttgttgctctgggatgttctctcctgggcgacttggggcccagcgcagtccagttgtgtggggaaatggggagatgtaaatgggcttggggagctggagatcgccgccgggtacccgggtgaggggcggggctggccgcacgggagagcccctcctccgctccggccccgccccgcatggccccgcctccgcgctctagagtttcggcwccagctcccaccctgcactgagtcccgggaccccgggagagcggtcartgtgtggtcgctgcgtttcctctgcctgcgccgggcatcacttgcgcgccgcagaaagtccgtctggcagcctggatatcctctcctaccggcacccgcagacgcccctgcagccgcggtcggcgcccgggctccctagccctgtgcgctcaactgtcctgcgctgcggggtgccgcgagttccacctccgcgcctccttctctagacaggcgctgggagaaagaaccggctcccgagttctgggcatttcgcccggctcgaggtgcaggatgcagagcaaggtgctgctggccgtcgccctgtggctctgcgtggagacccgggccgcctctgtgggtaaggagcccactctggaggaggaaggcagacaggtcgggtgagggcggagaggacctgaaagccagatctaactcggaatcgtagagctggagagttggacaggacttgacattttgcgatctttcatttaccagtggggaaactgaggctcagagactggcccaagattacccagcgagtctgtggtcgcctgtgctctagcccagttccttttctaggactctggtttgcgacagggacctcggctggagcrtgtcctgagatgccgacacaccctcaggctcttgggaggctggggtgggaaggcgcctggggttggcaggcaggaggtgcctccgcaggcgagaaaaggcggtgaaaagttgtctggctgcgcgcaacatcctagtccgggcccggggaagaaaaccttgccggaatctcaggccgggtctcccggatcggacggtacactcggttctgcctctttgcgggacccggcccgttgttgtcttcatgctcgaacacacttgcacacccactgtgtgaagtggggtctggagcggagagaaactttttttccttccttggtgcaggacgccgctctccttgcagagcgaagaagggggggaatagggacttgtcctgggggctttgacagcttccccaagggtctccaagtaacagccaactgtcctgcgtaaagcattgcacatctttcaaagcgctgtggtccttggtgtaagcgcatagtcagaagttcaagctccgaaaacctttcctgtgggccttggtacctagctttagtgccattccttcctctccctgccgcctaaaatttccgtctccttcaattaggaacacacacgttcttcatgcaatagctgtctgtcttttcttcctcactttcctttctctctcaaccccttagataatatttctttcctgcagccagtttgctgatatccagatttccaccctttgcagggtgagaaaggggaaagggtcagagaaagaaaaaaaaaaagtcgaataattcagggaaaaaaatttcttactycctaagacaagaatcacatgtcttagaagacactcacacccacatacagtaccaggatcatctgtccatggttactgaattttctttataatgacttggttcaacgggtccagtccaccatggacactcatttgtcccagacaagccctctctctccccctttctgggcagagaatgaaggtctggaacatgtggttgctctgtattccacaaagaagtgagttgcttttaagcctggggtgtttcctagcgtagtagtaacggcaggccggtcgccctgaatataatggtgaacttgcccttttggagtgcattacttgcttaattggattgggctgtaattggtgccatcaaattctagagacagaggcactgttgtttttccttcccgtctttgagctggaagggtaacagtgcacaaattaattaatattggttatgggatttgaacatagaagggctttttattgagtagtagcatrtgtacctcttacagttatttctttagaactttctgaagagtccagctcaagcttgccaatgaaaacgaatgacatttaatggagcaaaaacaaaaaacaaaaaactatgttggtctacaaatatgaatttgaagttattgagagccttgttgaatagatttttgttgtaaacgtgtctctagaatagtatggcatwgtctcagcttcctatgaatgaaggacataccttttcttttttaaaatatttgttacacaggaaagtgtgtctagaatgtgatctgtggcaataaattatgagagaccttcaagagtttctgattttggtagccgagtgggcacagtttattgagaatcatttttactgccatttgttttctcacaagaatgtgcccaaataatggtttttttctcatttggatggcagtgtgaattgtacatcatgttttcagcatctttctcaacctagtgttccccagtcaagtttgaaatctgtgttatccaaatgaattgttttcattttccttttcttagacaaagtgggactccaggtttcattttgcttttaaacattttggttttttgtttgcctgttttgggggcagttatttctttcatattaaaaagtactgtgcaggctgggtgcagtggctcattcctgtaatcccagcacttagggaagcagaggcaggaggatcgcttgagtccaggagttcaagaagtgcctgggcaacatagcgagaccccattctctatttaaaacataaatgtaacccccgttccacgcacaaagtactgtgcaaattaattaaacatgaccacccagaccagcaactgtccaagagtggcccatagaccatctgtggtaggataatttgaaatgcttgttaaaatgcagatttgtagacccagggatattctgacagagtctaaagtcttaagaacaaaactgttctaaacataagtcagtaccaatgccagttaatttctgagatatattgatataacttagtttccagttttttaaaaaccatattattgacttaaaaaccatgatattgaccagttatgtcagtaacttattttgcacatctgtgtggtgtgtgagaacatgtgcagtcacttattcattttgcctgcatttgttcatattgggatcctcagattcaatgcactggatgtttgcactgggtatttacttatactctctctatttattccgtctcatacttcgtcctatttgttcatactctcttatttgcccagcaaggtcaatgccagtttaggcytagggagtcattttttcttagttgatatgacttagaaagcttgggwgcctgcccaacatcaattacttttttaaagctggtattttctaggtcttgatatttattaagaccctagcatagtggacaatttttctttctctcatgctttttcaacacctcatagctcttcacatttagttgacagagaattcagttatcttgctgtagagtgacccatggtgaggaatctatgccatggtacttttctggttcttatcccttataggtaaagacaagtttcttatgtctgaagcttgatgtcaggatgagttcagggctttgatgaataagttcagatctcccaattgtaattcattagcattgcacttaaaaaaatttatatacgtttttaaaaaagggtaatgctaatgaattacaatagagagaaaagtacattagtttgcatgtatgtgtgaaactgggaaaatttttcacgaaaatattcatatactttttaaaaaaagggtaatgctaatgaattacagtagacagaaaagtatattaatttgcacatatgtgtaaaattgggaaaattccacacatacataaaagtatattaatatgcatgtatgtgtggaattggggaatgttttctcttcctcagtttctctcccttgcttttaatgtacagtctttatgagccattatttcagctgtggcagtttggttaccaggggaagcgcactagaaaattgataaaggaaaatgagacaaggtcatagattctctcactcccttcagggtacgtagatgaactatataaaaatccgtctaagtgggattcgttaatcagcaatttagtcaaatgtgtacatcctatgttctataagaaatgtcagtgggtcctttcccaagggagtgagatcatcagatgaaggttcatttggtttcaatgtcccgtatccttttgtaagaccttgaagttggcaatgcaggaaaacaggaactccaccctagctccatgaattgcagaactgttgtgttggtttatgaccatctgcccattcttcctgttatgacacagcttgtgaacttttactgagaatggtgaaaagtaaattcccagttttatacaatgaattgctgaagaggccttttaaagtatagagtatgcattgtttatggaaggtgtttcctattaggtctaactcagtggcaactacattcatttatttaatttgtttctaggtttgcctagtgtttctcttgatctgcccaggctcagcatacaaaaagacatacttacaattaaggctaatacaactcttcaaattacttgcaggtaaggattcattctagatctagatttcttgtgttaagtamctgattgtttattgagtggaaataatttccagtagagcagaattataatagagcttgtagtaattgttcataagtggtgaggtttctaagaactgatgtaataatggaaaatgagaagaattttctctcaaaaattctgtacaattttgctggtgtttttatactattctctgccaacatgcatacacacacacacacacacacaygcacacaaatacacacacacacccacattccaataaccagtacagccacctggcgtatagtagacatacgctcaataaatatgaatgaataaatgaagttgagggcatacatttaaggaatagagttgaaaaaatttgggactatatttattatgcttggtatgattcttgaacacttattatccctttccaaaaactttgctttataagaaatttattactataattacttaggcagtaatatttaatagcaatttaatatttrgtgggtaatattactgagcgcatgatctacataaataatggacttcgggccctgccttgatattctggaatgcatctttccccacttgctagcaagaagtcatgctattgatttttgataactggagaagtagacttctttgtcaagaagaagaggcctttaaattttgcctttcaacccttaccccaggaygaaagatagaagacccttgggtttaacatagtgatcacacacgaaaggcatggagccttcttaggacctgtgtgtttttggtagagactgtgacaagtggaggtgatgttaccctcctggaagagtgctgggggtccacaaaggaccttgggtaggttattgccattgcttcatacttgttgaatactaagcattaaaccgaatgacatacatctattttagactgcagtataaagaataccctagccccttaccaatacccagcccttgggaaaaaacacagtagcaggtgctgtttctctagctttayttgtttaagacacatttcccattagattttccttttaccgaccctcgataacaaggttatttgaaatccccaaggatcccatgctccctttttaaaactctgcataaacatttcttatgttctgaaaaaaaccatggagtgtgttaaaagtaacttcattgatttagctgcaacttcctggaaattttaagttctttgaatgaagggccaataatgttacattcttcttgatgttgactatcttcttatcttccttggggccttgtagagaaatgctgcagtacaagccatctatgttttaatgcgaggtccttacaaggtcctgagggactcttacttgcacctccttccttcctaacctcacttcttactcccctttgctcactcttacctggctgctctggtttcctggctgttcccttaatactccagatatgcacctgctccagggcctttccatgtgctgtttttgctcctgtaatactgctcttcatgatgttcctatggctagctttatcaagaccacctcctgcaaaattctttactcttttctttgtatcttctatatttttctccatagtactaaacactatcttttatacaataaactttccttactttttaattgcctgttttctccagttagactgaggttccataaaggcattgatttttgtctgatttgttcactgctctttctctagtccttaacaagtttggcacatagtagatgcttaatagatatttgttgaaagaaagaatgcattaattaatggaaaactcaggaatctttataagtgacttctgaagctgagtttataacttttcatcatatgtcaatctgacttgttggtagaagactttgtttttttttttttgaggcagggttgccctcttgcccaggctgaagtgcagtggtgtgattttggctcactgcaacctccacctcccgggttcaagcaattctcatgcctcagcctcctgagtagctgggattacaggcatgcgccaccacacctggctcatttttgtatttttagtasagacagggttttaccatgttgcccagcctggtctcgaactcctggcctcaggtgatccayccgcctcggcctcccaaagtgctgggattataggcatgagccaccatgcctggccggtagaagactgactgtgtctgttgaagagtttatttaagtttcaaaaccaaattttctcttttcttagaaatagcctcacagtctggcacttcatattaatacctccctgaaattaatttttcaggggacagagggacttggactggctttggcccaataawcagagtggcagtgagcaaagggtggaggtgactgagtgcagcgatggcctcttctgtaagacactcacaattccaaaagtgatcggaaatgacactggagcctacaagtgcttctaccgggaaactgacttggcctcggtcatttatgtctatgttcaaggtaagtggtgaaataaaattcatttcccacgtctctttaccagttataaaagacaataggctcaaagaagaattgagtacaacaaagggcttgctctaaaggctgtttgccaagaggaatacacacarttcttctctcctgaggctttctctgagaaataagactcattgattctggagcttgggccgtgttacctcttttttgcccagttagtttgggtctgatctttgtttccaaggtaaatctgtgttcactgttggccaytgagacttataaaaagtcttcctatgtttgagaagaaaacctaaaattcttgaaatcgaggaagatttgggggtgaattatggagaaatttctgtggagagataagttatctacagcagagtaggagattttcccaagaatgcataggaaagcattttttgccaagggctctggagttttttgcacataggaacctttttttcttactagtatttcataaaaaacaattcccatactcatgtgcaaataaagacattgcttcagactcttttcaggacaatgtttctttcctttgcttgtttggtctgagatcttggatgatatgctgtatctttctaggatgtgcagtttgggattgatattatgaaggctgacttaacatccatatagtataaaataaatgtcacacatattctgcatttataatgagttatgcattcttttgtgtttcaaaaatcttacactatcttatcttttctgtgaaaacctaacttaactaatgagatccctatgatataaatttaaggaatgtaagggctgcatcatagtttggttggatgtaccaaatatttttcttttcagtgaagataaacagacattttatgtatttacgtatatgcctttttacatcccagagtatttgagacaggtgaagatgacttagacttttttcccagaagcagcttttacagggcaagaatttcatcagctttgggaaacacacttgcatatctctgcttacatttcagtagtgtaatatggtcagtgcaatgaaaaagtggagaccacatcaaaataacctatgccactggattcacaatgtttgagaaatatctttgcccagagtaagcactgtcaaagatagaattctgtgccctcctccttccctccacaagatttgaaagagacaaggctcacatcttggagaatttctggctccttttgacctggcagtcttgagagatgcagctcggtcagaagattgcaaggatttcctgctttcagcctgtctagaaatactacaagatgaacatcccccatatctcattatttacttcttcctaagtcaggaaacttggagacatgtgaaaattcatttcatgagtttcagtaaatattttattttgagaggctgggtggtggtttgggtttcttttgtttatttcctttttttgagataccgaaatagaattgatttactaaataggtttagtcttacgtcaaagggttaatttagcttccaaaggcttgctctgtaagcaagttatgtaatatttcataacatgtggatgaaaggtaggcaatattaagaagtggcaatccctagcactgtttattggtacactgcctgtctttgggtataccattaaattctgcttcctgtctaagcttaaagttctaggagttgggctgtccaagattttggccatgaagttaaacaatgggaaaggaaacactgaagtattctctatggataggtgtttaatgtcccctctggtcgccaccttacttccctagtcttctgaccccattctcttcagcaatggatggagccaggaagtgagccctggcctcataagataatggctatggcatgtggtgggctagattggctgcttttctgtgctttccagctgggaaggaaatcaaacttctgctgttgcagggaattagctgcctttgtcccctgtggtttaattaactctttcttcactttgactgrctattatgaagcactctgagaatgcttgatgrgatgtgttgggcatagcaatgtgaaatgttatctctctgagatttcaagcatgactccacaccacatcatctctatctctgaggaatggactaggtttccagcagcatgttaacattgtatgagtaatgtttgattggccttgaaatctttttttttttttttttttgagacggagttttgctcttgttgcccaggctaaagtgcagtggtgctatctcagctcactgcaacttctgccccccggttcaaatgattctcctgcctcagcctctgaaatagctgggactacaggtgcgtgccatcatgcctggctaattttttgtatttttcgtagagatggggttttgccacgttggtcaggctggtctcaaactcctgacctcaagtgatccacctgcctcagcctcccaaagtgctgggattacaggcgtgagccaagaacccagtcagaatctcttcagttttcttctcagtctttggagtggtgacttttcaaatgtttgtcattgaagatatcaatgactgctaaatgttaaactaaatgcaaaaacaattaaacatggttttagaaagaatcatatccctagtcttcagaatcttaaaatgctcacatgaatggtcctcttgaataaccaaattcaaaagtgttagctgtttcctgttaatctaaagatcctttgggatccattcatttattttcatggaatttacattatttacctaaagagagagcacatgagtattttaaatattagtaaaacttgtcggtaaagtgtatagatttaactttaaattttaaagtaaatattatccttcattttgaaaaaattataatgattaatcttttaaaatgtgaaatctataaaaatatattctgcttgtcaataaaccttgtgaaaggagtcaatctcaattgggagttttttttcaaaatttttatacacacagatatatacacatgcatgtgcatgcacaaacacacacacacacatacacacacaccctcatgtagcacagatatctatcagcagaataatctgtggatgcctttggttgtgtgaggtgtcccttccagtcattcacttgtctggttagagtttaggaacctgaaaaatgaccaacttttctagtaaatactattaactcattaataaaactaaattttcttctagattacagatctccatttattgcttctgttagtgaccaacatggagtcgtgtacattactgagaacaaaaacaaaactgtggtgattccatgtctcgggtccatttcaaatctcaacgtgtcactttgtgcagtaagttgcatctcctccaatcgtctcttaagtttttataattttaagctaatattaagatgggtaacctgtttataatattcacaatgagttttaaggatcctttaggaagggtcaaatgcaatgaataaaactaattagtattcttaaaaataagatgaattcttcagtgatcattgtacatggctctcatttttggtactggattaaatatttgatatgtctttttattacccagagatacccagaaaagagatttgttcctgatggtaacagaatttcctgggacagcaagaagggctttactattcccagctacatgatcagctatgctggcatggtcttctgtgaagcaaaaattaatgatgaaagttaccagtctattatgtacatagttgtcgttgtaggtaagaggacatttcctttccatatcattaataacatatccttgtattaagatcttggagataacaacatagagtgaagaaggatattgaaaagtataggaactcaggatatggtgttgggcaattcatctgctcttctctaccaaataaacccatgtgcaattgaggttgtctcttttcttgccaagattaaggaagaaaaagaaaactttttaaaaaaaggatgaaagcgaatggtattactcgagcacattttatgaagaattcaatgttcagagcattgcttgctatcaattatttcaattatgactattttatggaaacttcagcaatttgctaaagctggccctactggcctagggctactgaccactgaaagtttactacttttctgtccactgggttacaacatctttgagatctgtgaaggtagtgctttgtaaacctctgttggccattttcctgggagctaccaagtattggtgaggcctgcagggaaaaacaatgtggcatrttttaaagttgcattactttaaaaaataaatctgtgcaaagttataggcttatttgctctctcatgttctrttttttcaatttacttgctctagggtataggatttatgatgtggttctgagtccgtctcatggaattgaactatctgttggagaaaagcttgtcttaaattgtacagcaagaactgaactaaatgtggggattgacttcaactgggaatacccttcttcgaaggtaacgctaatgattcaaagccagacctccaaatacttagataataagccccartgaagtttgcttgagagataggggcctctttggccagataaaatgtaagagccttaaacacacacacatacacacccactcacacacacatacacacacacacaatttaagggaattgcagaacagatagcacccaccaaaaggtgaaataccaggaattttgtcctattctgcaatagccaggctatgaatattagttttctctaggtgattacatctttccacattatgtcatttctctgttctccaaagtttttgatctacattccttttaagggaatttctctttaagaggtggcatgagatacactgctccttaaacagtggtcacatttacttgtgtttctgcagtttatatccatctcactttcaccacgtgaggttttaaaaatcctaattcagttggttccatttatttctcctgaaacaaaatatatttgttgtctgcatgaggttaaaagttctggtgyccctgtttttagcattaaataatgtttaccaaagcccagatttaattctgtgtgttactagaagttattgggtaatgttatatgctgtgctttggaagttcagtcaactctttttttcagcatcagcataagaaacttgtaaaccgagacctaaaaacccagtctgggagtgagatgaagaaatttttgagcaccttaactatagatggtrtaacccggagtgaccaaggattgtacacctgtgcagcatccagtgggctgatgaccaagaagaacagcacatttgtcagggtccatggtaagctatggtcttggaaattattctgtgccttgacaagtgagataatttaaataaatttaggtcacttagtgattcctattttgttcattcagaagatagtttctagtttttcttgttagggaggccacatgacctagaggtcaagagcatagctttgtagtcaggaacttgggttcaaacctcaactttaaagatgagatgtgctgatatacagtaagagttcatttagtattacttattatagttattgctgctattaggattgttactatgataaatagtattagctaaggtagtttttaaattttcattttattgcaaggctgagaggcctacttgaataagcatgagctttgcaaactggggaaacatttagcaatatacagttgacctgtgarcaactcagggattgggggaactcaggggagttcccctaactttccctcctctgcagtcaaaaatccatgtataggccgggcgcggtggctcacgcctgtaatcccaacactttgggagtctgaggtgggtggatcacctgagatcaggagttcgaaaccagcctggtcaacatggtggaaccccatctctactaaaaatccaaaaaattagcctggtgtggtggtgggagcttgtaatcccagctactcaggaggctgaggcaggagaattgcttgaacccaggaggtggaggttgcagtgagccaagatcgtgccattgtaccccagcctgggcaacaagagtgaaactccttctcaaaaaaaaaaaaaaaaaaatcaaggtataacttttgacttccacaaaacataactaatggcctactgttgactggaagccctactgataacataaacagtcaattaacacatattttatatgttatatgtattatatactgtattcttccaataaagctagagaaaagaaaatgttattaagaaaattgtaaggaagagaaaatatatttactattcattaagtgtaagtggatcatcataaaggtcttcatccttgtcttcacgttgagtaggctgaggaaaagggggaagaggagggggtggttttgctgtctcaggggtggcagaggtggaagaaaatctgcttataagtggactcatgtagttcaagtttgtgttatttaagggtcaactgtaattgaactggaattaaattgaactggccttgagaaaatcaccttaattttttgtttattctctttcatttacataaatgtctgagtttacatggtaatttgtrtggcatcctacttataagccttggaaaggattttggagtttatattatgagaatgcatcaatacagtgaaattttaaaaataccttagataatgctatttattagagttgtaatcataaaagtggcaacaactataacaagtatgatttagtgagcacttactttattagctcatctcatctttgaagctgagattggaactcaagttcctgactacaaagctatgctcttgacctctaggtcacgtgrcatccctagcaagaacttgaaaatttcttctgaatgaacaaaatagaaatcactaagtgtcctaaatttatttaaattatttcacttgccaagawgcacttgtcaaaatacacagagagagatgtgctctggcttatgtttttatagaattacttttgttytccagaatacttcagggaaataggggcagaaataaggaggwcagttgggaggctaattgcagttatccaagtgagagttgaggggtggcttagacaagggtagttgaggtggaggtagtgagaggtgatctgcttctggatatattttgaaggtagagtcaacagggtccgctgatcaattcattggttgtggagtataagagaaaaagagtggaagatgactcgagcgttagcatgagcaactgagtaaatgatggtgttatttactgagatggcaaagatcgagaaggcagtgagatttagggaaacagtgttagatatgtttatctggagatgcctgttaaacatccaagtggagatatttaacatatcaacccggaacccagaggagtcagggcagaagataacacatttaggaggtacgtgaatgatactttaaacctgaggctagaggaaggtgtaaataaagaggaggtctgaggactgagtcctggggcctcatggtggaagaggtgtgtggaggctgtcatgggagcagaggagaaggagcacccaagcatccctgggggacttagagaaagctgcacagaggagcaagtgtttgagttgagacttgagcaatcactaggcttgtgggagtgcactagcggggagagaaaagcaaatgcaaacacaggaggtgtgggagaaacacgggaggtgtgggagaagctgaaaagtgacccactgaaagatagtacaggaaatcttggaactgcagctactcagaccctcaaggtctttgacgtttcacttgaaatgaaaaactaaatcaaatgaccatttacagtaagttgaccttttttttttttttattttcttccagaaaaaccttttgttgcttttggaagtggcatggaatctctggtggaagccacggtgggggagcgtgtcaraatccctgcgaagtaccttggttacccacccccagaaataaaatggtaactactggaaataaatgcaaagcatcatttcgtgtgagagcaaatcctttgactatactaattcctgagaattttttttcataggtataaaaatggaataccccttgagtccaatcacacaattaaagcggggcatgtactgacgattatggaagtgagtgaaagaracacaggaaattacactgtcatccttaccaatcccatttcaaaggagaagcagagccatgtggtctctctggttgtgtatggtgagtccattcaattttcctctctgcccaagatttattatgatacattgtcttccaaatcagccaaaccaccgttcctctgcctcctgctgcttcactcatatcatggctgggcctgygtacaaaagtcatctggcgtggtgaagctgaagtgaaacgtaggaccatgtgctctggccatgtttgtttaagaggccgtgtaaatgagctttgtggtggacaaatgcaagattaaagtagtgataccctcgatagctaaatgttgtgaaataagaatgcccacagggacagttgtcaagctaagttatactaccatgttcccctctcatggaattgcccacctggtacacagatgtgtaagacccttctccttagattttgtgcaaagcttctagtttgatrttgtagttgatgtatcagagatgtgcaggcacgttccaactctgaaggcttttgaagttgacactgttggcttggttgggagcttttcttttttcctttttgacaggagttcaggatctgattttgagtctgtaaaggaaagatagtaagtttttgatgtaaagataatttgaactttgttttctgaaactgaaaggtacaaataagtgtttggaatggagtggggagaagggtgccatggtcaagtgagtgtgagaggtgctaaggtgatgtgtagatgtgtaacaggtttctttattgcaggacttcgcagaaccttttatatgctaatgtatattggtattctccaggaggagagacatagagtattcaaggtttaacaaacctatttgaccagagcaccttttttcccctgagcaaattcattaatctctcactccaaacagttygagaaatgcttctytgttgtaattctttgttcccccttctggtacggcatattaaaacttcaggatattttcccatgacattaaggtgcttccctacgtgtcctgatactcttctgtaggccgctgaacttggctttattattttttttcagggaatattttaaagataggctgggtgccgtggtttgcatctgtaatcccagcactttgggaggccgaggcggatggatcacctgaggtcaggagttcgagaccagcctggccaacatgatgaaaacccgtctctactaaaaatataaaaattagccaggcatggtggtgggcacctgtaatcccagctacttgggaggctgaggcaggagaatcacttgaacccaggaggtggaggttgcagatagccgagatcgcaccattgtactccagcctggtgacaagagcaaaactccgtctcaaaaaaaaagttaacaggttccaaaaaggttgtttagaagcagcataggtgtaggggactggggagaggagaaactggaaagtgtataagtaggatgggaggaggaaatgaacaggaaataaaaacaaaacacggacagcaaatagcccatttcatcagttcatgaagccactaaatattttattcactttagcaaattctctgctatatgaaataaacataaaaaagaagtcaagtcttcaaagcataatctgaggctttaggttgacagtaataaggaaatagttttgactttggagtcaaaaaagaaagaaaggaaaaagggagagaagaaagaaggaagtgagagaagggagaaggaagaaaggggaagagggaaagggagtggaragggagggaggaagagggagagagaatgaaaaactcagatgatggtggcaggaatgcattctctaaagatttacaccttcctttaacatgaggtggtttacgtgtttgggttcagaagtcagagtgtctaggtttgttccaggttttgccgttcgttaactgagtgaccttgggcgagtcatttttttctgtttcatttttttctcacgtataaagctgtggacagtaatagtggttgtgaggattaagtgaatgaattcatgcaaagcacttcaaacaatgcttggcacataataaatgtatttactgtgctatttcagctgttttctgtagccttyccctgatctcctaaacttgagaggacagagagaactatctctgtaatacagatgagaggcacaggatttcaacacttccataaagtcattcagcttgttagtttattattattattagcttattgtcatttttattttatttcgttactttattccttttttttttttttggtagagatggggtctcaccatgtggcccaggctggtcttgatctcctgggcttaagcgatccacctaccttggcgtcccaaaatactgagattacaggcataagcccccatgcctggctagttgttatttttatgagtatcactagaactcaggtctcttgtttccacatctaggtgttcttcgaaaaagaaagtggaagcaaaatcatatgcttaaagaaagtcagctttagttgctaaaatcctctatttcccattcttcaaagctgactgacaattcaaaagttgtttttcccatcttcagtcccaccccagattggtgagaaatctctaatctctcctgtggattcctaccagtacggcaccactcaaacgctgacatgtacggtctatgccattcctcccccgcatcacatccactggtattggcagttggaggaagagtgcgccaacgagcccaggtgagtaaggccacatgctctttgctttcctgccatcttgcatttcttacagctgagctatgatatgactccatcctaaatggagaagcctaaaccaaaaaaagttttctctcaagaggtagcctgaatctccatccatctttctctgtgtcttacattttaggggatgtctttgcttggagtatcctcctttggggttagctaagctcagccttgttaggttagccgtgaggtacacttctccaaacacaggctatttgctcagtttgctaattgccagtctttggtttttctcccgataccaatcggctggtgaataccacatccctccttcttgtgtgtgtgaagatccatctctcagaggaaatgctgatagatgagaggcagtgatagacccagccccagtcctcagggtctcaggcccagcttatcatgctctgacacaagtccagacatccttagggaaaaacacaacaacagcagccaacccaccaccaccctaagcagtccacttcctgttgttgtttttgaaatggccactatgagcttcttcctcagctgctgatcatttccttcacagagaccatggtcccagagaaattactttaaggagcccagtggcttctaagtttccttgccttcctttgaactaaattaacttgaattgtcttgtcgatccaatttatgaatgaaggtttattcccagaatagctgcttccctcctgtatcctgaatgaatctacctagaaccttttccttcattgtcaatgcctatttttaattggcgccaagtcttgtaccatggtaggctgcgttggaagttatttctaagaacagaataaccaaagtctgaatcttttccttactcttgactctaattaaagaaaaattaaatcataatatgcgckgttatctctttcttatagccawgctgtctcagtgacaaacccataccctygtgaagaatggagaagtgtggaggacttccagggaggaaataaaattgaagttaataaaaatcaatttgctctaattgaaggaaaaaacaaagtgagtttgaagttttaaaatttgaaaatctctctctctttaatggaaggatggtacaataatatgtgaggcatattggagattaataatcaaatagtctggatgattaaatagagcgtattaagtcactttgaaaataccattgacttttagcagtaccattaacttattaatagcttatcagagaaaaataaaaacatctatgacattaaatctatgcatctgtgtagggtgattctgattttataaacatgagaatgaaaaaatgtgtatcatatcatattaaaacacatcattagtttcatggcttccaaagccctttttatataatgtgtgagctccacagcagcataattatacaaattgagtaaatatcccaaacctaaaaaccccaaatccaaaatgctccagattctgaacctttttgagtgccgacatggtgctcaaaggaaacgctcgttggagcattttggattttcagattagggatgctcaactggtaagtatacaatgcaaatattccaaaatccaaaaaaaaaaatccaaaatccaaaccacttttggtcccaagcgttttgagtaagggatactcaacctgcaattgcataaatttgagcgtgtccaaccgctgcagaagtgggaatggcataggcaggttggagtgattgtggagactgctggactgagtgcttgtgcacaaacagccgcgttgtttatggcctgggatttgttttttccccgcacagactgtaagtacccttgttatccaagcggcaaatgtgtcagctttgtacaaatgtgaagcggtcaacaaagtcgggagaggagagagggtgatctccttccacgtgaccagtaagtactcttctctggaggtttgggttggatcactcacacagtgggtactaagctatgtaattccctgttgtttttgccattcatgtgagtggcatggcatttaggaaagaggacttggattgatcattgatgctttcattcataaattamaacttctcaggtatctcctgggcttatgtgaagtcagtgcgtctaactacactggagagagaatggtttcacagatgctttaaaccacaagctctgtgtggtatttacatctcagtcttcagagtctggcacagtgcctggcttattgagcttcagtacatattggtgggcttgctgtggaacagttgatgagggtgggctttatggaggcaatcagaaggacataggagcagtgccctcccaatgctgccgattttgcctgtgcatcttagttttatggataagctttagctgattgtgctgaatggaatattatagccagggctaattcattggcataaatgtagctttcatatcattgagtgttagtgttaatgaagacctaattttaaaattctgttagaattagagattttgctttggatttttaatatattaaacattgygtagagctcatagtggagatgtggtaaatatctgaggaattcgtttacattttcaagtaatgtgtttggccaaataagatattttgggacctgaattgtctagtttgtttgtcaagttgtagtacatcacctggaacggatagagcttcatttcttttggtactttgtagtagtctgaaagcagcaagatgatagtgagctgtaccaagttaaatcaccattcaataactatggcctcttcattttagggggtcctgaaattactttgcaacctgacatgcagcccactgagcaggagagcgtgtctttgtggtgcactgcagacagatctacgtttgagaacctcacatggtacaagcttggcccacagcctctgccaatccatgtgggagagttgcccacacctgtttgcaagaacttggatactctttggaaattgaatgccaccatgttctctaatagcacaaatgacattttgatcatggagcttaagaatgcatccttgcaggaccaaggagactatgtctgccttgctcaagacaggaagaccaagaaaagacattgcgtggtcaggcagctcacagtcctaggtagggagacaattctggatcattgtgcagaggcagttggaatgccttaaatgtagtgcaattcaggtgctatgcaaagattactgtcctctaggagattatgttgtaaactggtgcacacttcttcacygaaagtccttgaggaagaaagaagctaataataatgaaatgatatatcgaaaggagaaaataacaaaacctgatgatggagtaattcactagtatatgcaagggatattagcttgaaccagggaaacttctgccttatcttgggcatccatttatttaaatagacaaatatttgtggaatgcctgctatgagctaggagagtgtcagaaattcacagtggtaaacatgaaggaaaggaggagaacataggcaaccactgggaagtcacagcacagtgaggtctctgtgtccatgagaacaggaattgttctctgttttgctccctgctatagctctagtcatagagcatagcagcatatactaactgctcaataaggcacctgctgcatgaagagtgggatgatgggctgcgtttaagacctagaagactccatgggaaggaagctacattcactgtctgtacctctgggtcatcccacatgatccagcgtagcccaaggtcaatgggacgatcacttcagtgagcagatagctctgtaaattcctccatagaggcactgtctaccccttgtctaacctcatgccttgtgcaaaagctgggcagccatggctttgtctgtgggaaaatcaggcaaatttggggagcgtctctttgtgccacttctctccattttctcctcttgtggtgtccctttccaattcctaggatatatgtgccctctgttttttttttactgttaggaaggaaattgcccaagtaaattcatctataccacagttttagagggtaacgtcttcatcagaggccttggcgtatttgaagaggcaccttctgacagacactagcataaagttcgctagttttaagactcaggtgtcataataagagatactttggggtcaagtcatccccagcatccttcaagtcacaccacatagatcacatggattttctgttggcttgtctgscttcaaggttatggcagaattgagaaagagatgtgaagtaggctcctggcctagctgtgcccagaaaatatgtgctcgcagttagctgctttgcttccctaaggactcctaacttgttttcctaaaacctattcttagaaataggctagaatccagtacatttgcttagacttcaatgtagtacgmtgttgaggtaatctcattttgctaagtgttgacgtggattttttcagcatgattccttttgatgttcagttggttgggacaagatatttccacagcactttgatgatctgaagaaagaataaatctaaagtgttcttgtacacttaaacaaatactcatgggcttcattttctttaaatccaagacttcccttagggtattgttgttttgtttgtgttttagtggaaatagcactgaactggtcttttagcctcaccagattctgtaaacagttcaactgtttacttagttgcagggacatggacaagtggtttaatgtcgctgaacatcatttatttcatctgtgagataacgctaacagtcctattctgctcattacataagatcactagtgaggaacacaaattgtgtaaacaagttttataagaattgccaaataaatgtaaggcattattggttgaatgatactaaaatttggcacttccaagagaaatttgaagggattctagggtattattkactagaatcttcatgggagggaagttttcacctggggaggctgtgtctaattagaggaaaaatccataaaggtgaccctgaacctttcttttgtgatgggattaccagctagtatcactaatatgaatgttaaaagccattaatctgtttgcagtgtcctgactgacttgtttcatttaactttayccagtgaccagtgtattttcccagaagttaatatatcaacaagttcctttttactaaatttaaactgtttaaaactttgctgataccagaaccatttcaaaagttataattccatgttctgtgattttctttttgtgtgtctagagcgtgtggcacccacgatcacaggaaacctggagaatcagacgacaagtattggggaaagcatcgaagtctcatgcacggcatctgggaatccccctccacagatcatgtggtttaaagataatgagacccttgtagaagactcaggtaaatagaatttggctatcactcttgggttgcagaactttcccagggatgttatctaaaaagccatattatttcttgatgtaatgtagaaaaaaagcagtattggtgtccatgacctggctcatttcacagacttagaattggagtatggggccctgttgaattttcatgaaagccatataggagattagtcagcagtagatcccatgtgactctacagagttagataatagaacaagatgaagggcagcatttatattttctaaatttccctgaaaaacttcacagactacatcatcataaatgagaatgatcgttttcttcctctgttaggcattgtattgaaggatgggaaccggaacctcactatccgcagagtgaggaaggaggacgaaggcctctacacctgccaggcatgcagtgttcttggctgtgcaaaagtggaggcatttttcataatagaaggtcagtgggakaaaaaaaaatgtggtacatatacaccatggaatgctatgcagccgtaaaaaggaatctgatcatgtcctttgcagctgcatggatggagctggaagccattatcctcagcaaactaacacaggaacagaaaaccaaacgccacacattctcacttataagtgggagctgaacaatgtgaacacatagacacagggaagggaacaacacacactggggcctactgtgggttggggagaaggagagcaycaggaaaaatagctaatgcatgctgggcttaatacctaggagatggattaataggtgcagcaaatcaccatggcacatgtttacctgtgtaacaaacctgagcattctgcacatgtatcccrgaacttaaaagaaaaaaagaaggtcagtgggaagtcatagatacatcctgtggtttttgaagattagtttgtatcttatagacacacattcactttgaatagggcaacgacagatgatttttaatattctttgtactttgtaaattttctcagtgagtatgtattcttttaaccagcaaacataattaatgttgttataaktctgcttgcatcacatttcctattcctgcagttcttattgtggaaaaattcttaatcaggcaggatgaatagcctcttctccctgattctgtctttgtttgaatggcttgattaacttatagaaatgatgcctttatatttatttggaaaaacattagaattgctgcctaatcatggcagtcaatgctatccagatagtcacaaggattccgagttttaattggactagagataattaagattcacttgtgaacaatagaccattgctcttctgacatggaaaatttttggtttttatctcaatwcgtgtgtatgcagaagtgatgtgaaatctgtcattttcttagctaggaaaagtaatttgtggcagaatattttatcttaagaagtatattcctatggcttttttttttatagcccaccagggaaagaataaaactgtgttgtggggtaaaagaatggtatgcaagggtaagaaagaagtatggtgatagaagggatcgatggatttctatgaactcatcctaacttgtctctcaaagtctagattttggtccctttactctgccaaatctatgatgccargtattgcatcgaratatgttgacatattttcaaatgtataagcttattagcatttcataaactacacttgcaaataaagatttcaaagaccatggcrgttttgtcatttccaaagtgattcatgttttagggcaaatccgcagaatgacgtctagattgtctctgatgctctgcattacctcttgttggtggcctgcagctggttacagatgcctaactaggtaacactggcacagagattatagttacttcttacctggagtgaatgctaagaaaggcagagctagatatttaatactcctgctgggttcccaaatgttatgcgagaatattaatatacaaacacatagaaaacagactctttgaactttttatcctctatgttcaactggacttttaaatctgtgtgtataaatagagaattacttccctaggaccaccagaraaacaaaatttactccaagcataattgtgcttgtctctcaatggttaagttaacttttattttgcaaaccaatttgttacttattttgcaaaccagtttcttacttgtcttcttctctcttgaggccgtagtgggccatccgcacagcktgtggcccggtttgattctccttgcactcttctgatgggaggccccaagtgatgactgcttccttatcatctctttgctaatcactcttagtggaaagcctgtttctgtattttgtttcttccactcagagctgtcctctgaagccctgagcatctgcagctttgcttgctgacttctagtttcctcttctctttcctttcatgagtgatttgaaactcccattaccaggccatgcgtgatgtgctcatcttggctcttcctcttctcctcactcagactcctgccacaagggatggggtagtgtatgtaatggttagttcatgttggacaggcctctttatctcttgactgaaccactgactagctgtgtgccctcagtcaagtagcttaagctctctggtcttctgtttcttcatctgaaaactgagagttgttgaggagattaagtggaatggcatatttaaagtgatgagtgcatagtagatacatggtcattagtaactctcaggtcaaaaaattttgtttatttccctacttggtttcttatgtgatccttttgcaaactctgcacagatcaaaatatygactatcagtttaaaagaagacttttgttttcctcaaatagaaatatttttttttctctgtagagaatgatctgttttctttccatcaaagactgctcttcctctaaacactttctatgtttggcttttaagacattactacttctatgcttaattacttaagaattttattgttgtaagtttacatgagcaatgttttgcaagctttaaattttccattaacaattctgtaggccaggtgtggtggcttatgcctgtaatccctgcactttgggaggccaaggcaggggggatggctagaggccaggagttcgagactagcctgggcaatgtagtgagaccctgtctctacagaaaataaaagaaaaattagctgggcttggtggtatgcacctgtagtcccagctactcgggaggctgaggggggagaatcgcttgagcctaggaattggaggctgcaataagctatgattgtgtcatggtactccagcctggaacatagaaagaaaccctgtctctaaaaawaaataaataaataaataaataaataaatmaataaataaataaattaaattcaaaaaaagaattctgtagactccattcaagttacgggtgtgtaactgttgtcctctaggatttttccaagttggtaagcttgggattttgctttagtgctaaaatttgtcatcttacaaacaaaaagtataagtttccaactgttgatactcattcaattgtgtctttccaggtgcccaggaaaagacgaacttggaaatcattattctagtaggcacgrcggtgattgccatgttcttctggctacttcttgtcatcatcctacggaccgttaagcgggtaaaaaaataatttcccttctgcccatrcacattggttttcatgattaatgaaaactgactggggttctttgagttgtttcttcccattgttattggctcaatgggcacatttttatttcaatacaataacgttcctgcccactttcttttggctggatctcagggatttaattgatagaagccactagagaggaaaagggcttggactgtctagtgtaattaagctttaaaaccttaattctgagctcctttggggracaagggaaactagaagcagggttataataggaccactcycaaactccatgagttttattggaaaatgagacaggaatgaggctccaataaacagcaataacaagcacacaaaacaacagccaaacaacagtgtgtttatgactggaaggattgatgctttccaggccaatggaggggaactgaagacaggctacttgtccatcgtcatggatccagatgaactcccattggatgaacattgtgaacgactgccttatgatgccagcaaatgggaattccccagagaccggctgaagctaggtgcattttcaattgctattaatttgatattgtgtttaccaggccatctcttcctccattagaatgatgacaaatgtggtgtattcagatgttggattctggtttagaaatattaattccatttcttgaatttgtataatcattcatatagccacttagaggtagggtccctatgtaatcatccaaagcaggacatttggagrgtgaagggggagttattaaataattaagccaggacaaaggagtaaactggactatccatgttaaattgggatgtatggtcaccctatctagttgatgtctctgcgtatcactttggttgtatagtaatccaagtctgttttcttgttgctgttgttgttgactctaggtaagcctcttggccgtggtgcctttggccaagtgattgaagcagatgcctttggaattgacaagacagcaacttgcaggacagtagcagtcaaaatgttgaaaggtaaaagcaaaattatgtggtgatctatctttctgttttatctagtctttaaatatgttgcaaggcttgtatcagtagctttgtgcttatgtgggcctactagccacacatgcagtcagcctaaataatgcccttgtgcaaattggaaaaaggatcctcctttgtagctttatgccaggatgcatggtctggcaagcaaagttgggaatggctttcaccttcttgcctgrttaccctcgtgcagggctcagccaacacagttgtacttagtggttctgggtacagggaaaaaggactgtggttatattaaaattgtttcttaatatattgtggaatcagatamttatagaccatctagaracatggaaaggaagatagtgaaatacaaaaatagcatgttctccagaattggaatatgtaaaagatgttcatatgtaaaagataatttgcaaaacaagaatggttgtgttagaaaaaaatataatgggttatattttttaawttaaaagctttataaataattgttaattctaatagtaacggaattctggtctggccattttcattttaggaggttagacagtaaagcttctttcttcaattgtgatgttctttcattgatgaaggcagtgccaatgaccctttgccaataggttttgtgcatttcaaagctatctttctccatctgccttttttctcttgtggccaagggagtgtgtaattttgaggtggctcatcasagccttagatgtggaccatgcctgtgaattagtgggaagtgtagcagtccatacaggatcaaacacatagtcttagtgccatcagcctcatgtgccaactggtctttccagctggccttaattcgcctgcacagatcggcacagattggctggaacattcggtatagcccctaacacgtgaagatatttaatacatggtgttgcttccttatgaggaagtgctgaaatgatcagaccctcagaatcatagtgaacctgaaatgcaaaaatccagttttgcagaagaagagaatctgggcatgattccactgcagatgtattctccgctttgcaaaaggtttcacaatgggttcctttaaatatcaaactttctggctcacttaaaatatgaattttatttcaaattagaaaatagaatttacacttcacttttgaggaaatgcatgtggtctgtaaactaggtcacagctgtgttaccccggagggtaagttgtatagtggcatgcagggagggagggaccccaattattgaaggaaatgtcccatacctatgatttccctctttgtactgtatttgtagaaggagcaacacacagtgagcatcgagctctcatgtctgaactcaagatcctcattcatattggtcaccatctcaatgtggtcaaccttctaggtgcctgtaccaagccaggaggtgagtaactgtgggtggttttggtcacccaattttaacatgcctctctgatagtgtttgagggaaagcagtcaactcctctggccttgattttcttagcttagaatactttgcggattcctaggaataaatatatttcatggaggtttaattggcactagaattaaattattgtaaaactttctctgaattaagaaatgtcatgctactatgatacagtttgttacttrwgtaacagatgtccagagaagagtaaacttccctaaaacttgaaagcttaagggtagttacccccaaaatggaatcatatcaggagattgcactgaaaagcaagtagatgggtgggttttcttctgaaattttggttaatcttgtgaaaatgtgttctggaaaaaagaaaagctacaatataaggggattgggaccagctgatttctacactcctgtcccaatgaaaggttgtagccttcttctaaggtgtttttgggttcatcactatattaaaygcttagtgaggaatatragtgaaaacccattttccttcctggacatgctgcctgcagggccactcatggtgattgtggaattctgcaaatttggaaacctgtccacttacctgaggagcaagagaaatgaatttgtcccctacaaggtatgtcatctcctaatcctgctctggccatgttataaaatgaagggaaactcaaaatggtacaggttagttttttagttgaaattttgtgaagaacttgtgaggaatcttctcatattacctcttggctgttgtaacttcctcttttaccttctgggggccatatgtttctgttttatgtatgtgattttaatctactgacccattacagagtgtggacatgggggagaaggcaggtatgagcgaggaaaggggagggcagagggtaggacatctctgggttattctgtctctcccctagccatatttggccccgtggagtgtaaatccctctgtgaagagcatcctaatgctgaaagtgtgtctgaatgcaactcaaaatgtggcatttgtcactttaagctaaagaaggagctaggctttgtggaagaaaccctattatgcacaaaacttgccccaagtttcagctcagagattgcataatcctgaaattgatgtcctccttgtctgctttttagtagwttcaattatctccatggtttactacattttaaaggttgtaaacttttaaagactcattttgtrttcaaggagtttgtttgttcctttgcttttttatagaccaaaggggcacgattccgtcaagggaaagactacrttggagcaatccctgtggatctgaaacggcgcttggacagcatcaccagtagccagagctcagccagctctggatttgtggaggagaagtccctcagtgatgtagaagaagaggaaggtactggctagtgcttcctgcatgctatggcatgctcttgtcagagcagacagggtgatagggtgttacaargaatttgatcatgggraaagtccaatactacctcataatttgaaagagacctgaatttctataatagactgcctccattctgtctccccaaaagtgaagtgtggaagccctagactgggaagtgaagcagggctagcctgagaaatctgggtagtccaagtgggctaagcagtcggctacaaccacagcagtgttcttaaaatactggttcagcatttattagtgagagaggccacaagttttctggtagttgactagcctctccattgccttggagagccccagagtggtttgccccacgttgcatgctttacctgtgcaaaagtcttttcattatacctaaccttctcaaaggcagtttaggagccatctgttgtttctaccctaccccaagcggcttatcaagtcttccttccaaccatacttcctcaggcgagtcttgataaatatcctggcctttattaagttatgtttccagtgatattttatttakttgtttttatgtttatttttatttttttgaggtggagtctcatgctgttgcccaggctggagtgcaatggtgcgatctcggctcactgaaaccttcgccttttgggttcaagtgattcttgtgcctcagccttccgagtagctgggattacaggtgcctkccaccatgcccagctaattttttttttttttgtattttyagtaaagatggggtttcaccatgttrgccaggctggtctcgaactcctgatctcaggtgatcygcctgcctcagcctcccaaagtgctgggattataggcgtaagcctcygtgcctggcctgagtgatattttagtgctctttttgggtggagctgtggtcccagcctaacttccaggacttcagccggctccaggacacactgtatttctgcctccttcagaaggagcagagatagcgttgtggatgtagagatgggtgacaggctggctccccttgaggcataagtctagaagaatagtggaagaaacccactctgtttcccttgacatgaggctacagaragaatttgcatttaactccttttccttagaagctgagaaggtagtgtgaggctgggacttggtctagaagcacatggggaggtggtctaggcttcatttagctgggcccacactgagtggtgctgcctctaccctgctctttgtctttcaaaaaacagtggccagtgagccagaaacctaagagattgagttgttgagaaaaaggctcacagccttttaaatacttacgaatttattactacaactaagtttttgtttactctggtatttgtctccaggaaagaagccataagtcttatctgaccaaagagatgattttgaaacacccatttaatatcttagtgtttatttgtaccagttgcactgaagtaaataccaccaatttacgtaaatttatctttccatgtttctgttatctctcaggaaaaaacaccctcccaggccagatttaatgtatttacagcactttttaagtttgaaaatgaattaaatatatttctagtatttttagttatctattgcagattatagtttgacttttggcctttgtcccaggacaaaacctggagagaagagattcaatgaccctgaatattgttgttttatttttagagttcttgatatgaaactattgtttatccctctgggtacatgacaaaaaacagtgtaagtggcaaatttggaaatgtcctctttatttcccagattayctaggtcagtrttaccttattctacctcctggatttactggttcaatttggctaaaatggaaaaaccagtattgttcctaagggggtatgatgaaggctaatgatactgggattcaggagatttacagaagatagaagcattgactctctgcttctatttcctaaaaacttaactcccaagtcttaaaaagattattactctagcaaacttagaaacatcacactaactcatggaaatactgatctccatcctcctgcctctttggacagctcctgaagatctgtataaggacttcctgaccttggagcatctcatctgttacagcttccaagtggctaagggcatggagttcttggcatcgcgaaaggtaagaaaggttgaggggaaatcagctatcttttcagatcacaggtttggaaataagatgtccagtgtcagccattggtgcttgtttgggattgtaattcattcaccacttctacgtcttttagaagagctctactggggaggctctgtttctgctgagtaagagtggttaaggagttcatgaaattaagctgtataataaaggcttgtcaagcatctactaagtgtgaggcagtcttctgagcactgaggatactgtggtgaacaatcaggcaaagctcttcaccttcatggagtttacagttctagtgggtagagcaaacaataagcaatataaacaagtaaaacgtgttgtaggttagatgagagtaaatgctatggggaaataaagcaagaaagggttatagaatacacaggagcaatgcacttgtgtatgtttatgcttctctgtgtgtgtacatctactttaaacaaggtagacgaggaaggctttactaagaacttgacatttgagcaatgacctggaaaggggaggggctgagccttacagatatcttggcatgagaatcatttttartttattttacattcatcaacatccatcaaaaagtatttgttaggagtataattagaaacgaggaaggacaggcttcagatgagagcgattaaaagagctaaaattagaaaagtaggccaaacaaaggctgagatggggacgtgacaagttacaactattccaaaggttgtaaacaccaagcggggagcaaggctggtggcagtgaytcccctggaaaggataaaaggtgtaattttatattaggtaacaatacttcaaattaaggatcaggaagaactatcagttgacagaatgtattcatgcagcttaatgaagaaagaaagacttaagtcatatttttttttgtttttcctaaattagaatgaaatcttcaacccatgttttccccttctcatagcattaaaggcctcaggctctttgatgtttctgctaggtagctcttatgttctctctcccaaggggaaggaggagaactgggaccttayagggttttcccaaagagaaaggccctttacacttcttggagattatgacttattattaccatttttttatggccggaattcgccacttagtcagggttccttttggggactaggaagagaatggaaatgaatgtgggaatgctttaactttccttacatctaccagactatttcttgaatccacttggttgtcgggttaaaaaaggaaactttttgtttggggggaaaagtcaaaaacactgtctgttttttggaattgccagtgttgctcaattgtgctagataatgtgcttctgaatatgccttgttcagaggagagtgccatacagatttgaggtgtgggaaggtcagcaatgcctggcttacatgatcacttctccaatgatttaagaattctccttttggcyrggtgtgttggctcatgcctgtaattccagcactttgggaggccaaggtgtgtggatcacctgaggtcaggagtttgagaccagcctggccaccatggtgaaaccccgtctctactaaaaatataataattagctgggcgtggtggcacacctgtggtcccaactacttgggaggcagaggcaggagaatcacttgaacctgggaggtgaaggttgcagtgaactgagattgcaccactgcactccagcctgggcgagagtgagattccttctcaaaaaaaaaaaaaaaaaaaaaaagttttcttctaagccattgattcatttcttgtgctccccaagactcattttcttacaaaatatcatgtggagctaaagctgccgagtagtaggaagttagctgaagtttggaggatacagagaaaggagaaactgagaagctaaaaggaagagaaagaagtcaagatgaatctcattgtaytattaatgcactagaaaatcaacctgacttgtgataggctgaaattgccttaatagacctttataataacccagcactttgaaatcaggggaagccacattgggaattgtttatcagagccagtctggcttcagcttcatacggaagggggaaaccaacaaagagcactaaaccaatgagagccccttgtttctgatttccgtgcattcattcaaaaaacaaatcccgttctcggacctccttagaataacacgttttaaaccaaatatggggccaggtaaaaggaatgtgtggatgtgaccagaaacacactcttttgtgtcctagaggagcctatttatgattccatcatcatattataacttaattatttaactccaaaggctggggctgtttatggaataagcagatgtgtgtctcagcaaagctcacagacttttttcctgaagtgttgataaaagatactaacccagtccttgttaatcagttggctttctgatgtgggatttttttttgatgcatgaggtcacaacagatgtgaaagagatcagctgtgccgagacctaatgcacacatgattctctttgcagtgtatccacagggacctggcrgcacgaaatatcctcttatcggagaagaacgtggttaaaatctgtgactttggcttggcccgggatatttataaagatccagattatgtcagaaaaggagatgtaagtttcaaatatgaacccagtgcttggttaagtaacagaattaaaactcctcgtagagagcttcaggacctgtgttcaggaacagaggaagtttttttcttcagatatttgctaatttgggttctgaatccttgtcttctacccctgtaggctcgcctccctttgaaatggatggccccagaaacaatttttgacagagtgtacacaatccagagtgacgtctggtcttttggtgttttgctgtgggaaatattttccttaggtaagtcatttctttttgtccttccatccagactccaaagaggaagacaaaagttgtcttttcctctcctgtacttcatgtctatcaggcaaaacttctcggaagctttgaaaaaaaaaatagatacataggtgatgaggatgtgcaagattcaggctcagggttttctataagagaaaatcaaatcaaagaatgtctcctccctgttttattctaggtgcttctccatatcctggggtaaagattgatgaagaattttgtaggcgattgaaagaaggaactagaatgagggcccctgattatactacaccagaaatgtaagactttaagaagtattcctgtgttctctttctttgctcgcaaattctccttgcctggaagactttccattatatagaccttcttcattgcccagttagtgtcctgcttttactttggggcctttcttgataatttcaagcatggagtcatcacttcttgaaaagatagtactttattattcaaagcaaccagttagtttttattagatgttgctttaaatgttttctatacacattgagcctctggagtatgggactctgtgtcttacacagttttgtatccttatttagcatctcacctcgtcrgctctttacaaatgtgtactcatttaagtgcttattttcagcattcaggaagaaagaggcatttaatgaaatcagtgttttgcttctctaggtaccagaccatgctggactgctggcacggggagcccagtcagagacccacgttttcagagttggtggaacatttgggaaatctcttgcaagctaatgctcagcaggtttgtcacctycatccaagaagcacctacaaagagtacttagatgtcaaggactttcctactgcctgaactgtctcatggctaccatgccatcctctcagccattgaataatctactgtattcttctacatctgagtaataatgcttttctraaagctgtaattacccttttagacagataggattctaatttataacccgggagcagaccactctgatttctacctacttatctttttgttatattttcaaatcctcttctaaagttaaaacaaagaaaaaatctggttgatccacagaagatcaacaatggaagaaatttcaagaaatttttaataaattctgcaggcaaaaatacatctaagctatgcaaaagagatggtttctgtcttggtatcatcccaggttcttataacttccactggaagattttagagttgtagtgtttactattagaatgttatttaatctctagtcaatgcctcttactacaatggaagtgaatttcctctttcttttcttttgaacagctgggggacgataggtcagctctatttttatcaataaaccttccaaacatttacagatatcaaatagccctttatttctttttcttgatgcaataatattaagttgtgcaaccttttctcaaaagacccattttcctacccatttgttgcttttctttagactgtcatcagtttttccattgccttgaaatgtggtggctaaaactggatgccatgccctttgaagggcttggctcgtgtggttagggctttgtgratgagtgattttttgttctatgtagctccktgtgttctgttgttacctctckgaccacagcctgctttctcttcattgtaactgcacttccctgtgggctgcttacccatcttgtttttagttctctcctttaatataccttccrtttcaacagctttttgtttctgacacatgatttgtattgttgtcttaaagttctrtgttcagatatgaaagccacacaccctatgtagccaagaagtccctgtgccctttgtttttaatgaaaaggcacttgaagaactgaagccataacaacagtcttctgtgtttattgtttcaggatggcaaagactacattgttcttccgatatcagagactttgagcatggaagaggattctggactctctctgcctacctcacctgtttcctgtatggaggaggaggaagtatgtgaccccaaattccattatgacaacacagcaggaatcaggtactgtatatggcctaacatcccccgggggagggtgacttcaaggccatctcgggagggggattggaagtggaaggaagaccttgtctaaggctgttgcatcccacttccacataaccttagccctgaggttaacataatggggaatgctcctggaagagggcctgggtaggtgtgcttcctcccatctgtagcccacgctgctgccacagcattgcctttaagaattccaagccctgcagctgcaatagctggaatgccacagtttgctaatttccagaataaagagaygagttttacaaagacatctgcatttaaattatccccgtgtatgcttttattaatgtgaattaaatggcttaggagagattcagaaaggaagagttctgtgcttgcatgagaacatgcttatggctctctggcaaggatacagaaagccatgggtctgtgtccggaattagactggacactgcatctcagaagcccctcccacgtctgattttcagcattttatttgcataatgggatgtctgggcttatttaaaacacatgcactgcagtcctttcctgatttgcagaggggttctaaaggcagctttcttttttctctctcccagcacctgtgcataaggaaagagttggtgtggttttctacaatatgatattaaaattgccctttactaaggctgggactacttcattttgctttgtttctttcctaacccgtttgggtgttttcctgctttaatggaacccctgacagcatgggtccagcctgccagcccgagtgtgcctgggctgcagggaggggcagggagctctctcatgtccagaacttggccaggttgccacatggcaggggatgctaaggagaaactcgtggacagtttgccctctagagtcgtgtggggcagcagaaacactgatgggaaggaagaaagcttagaagccagcaagacagctgaccgttccattgaagtcaaaagcattaggcatgtttttaaagaactttgccgtatattatcagatgttgcccacatcatgacactcagagtcaggcaaggtagaaacaatgatctttttttttgatgtattattgaacatgaggctcagttctattacctgagggcagtacaaacttgtagttaaagatcaggtattagagtcagatagaaatgagtaggacccccaagtctgtcttgtagcagctgtgcaacttggggcaaatcatctaccctctgcctcagtttctttatctgtgaaatgagacaaggtcagtggtgctgtttgaaaatggctgttttgagagttataagatataatctatttctaagcacctggcccttgaaagcactcagtaaaagatacctattaagtgagctgcttaaaatcacatccttgagatgaatccagttcctctgacccctaagtccatgttgtttcctcccatgccaaggagggccctcagagagaawcagtaatgagatgagactacaattccactcctgtgtttacacatttccagttcaagttgagctggccttttagtgtgacagttgttcccacacaccattattgcctccccctttatcrgaaagccatttgatcatgaactacattccatgtgttttctgtgaccaagtagagtgatgatccgagtcggcagcctcctggctcaccgggtgctttgcatatggtgctgagcaggagaagaaatcatgtttgtgtaatggaagcaccaaatacgatgttggatatatagaagggctgctaacgtttatccccagaagcgtggacaaatgtgacaccacactcccagcacaggcctggctcctattttctgtctgtgatttttgaattggtttttccagcccagtttctcttttatccagccataatttgaaaaataaaatggaaattggaatcttttgtctgcatctcctctccacctcctccaccttttttcctttctataaaataaaactcacggtcacattttaatcatctggttttgaagaaaagcagatagaggcatttgcacacggcatgcttcattctgttgctctcctggggttctgtttctctggggagaatgagttgaggctggggtacttctcagggagcttgttctatcctcttacgcatttctggccaagtacaaaagctgagcagtctttctccttctaattttcaattctattgcattataaatagagttggacagagatatcactgtgggagctagcttcatgatttgttgcccctttaaaccatttgaaaaatatttacttagcatttatttagagaaaaggctgagaagtgtgtgggggagggaccactcatgtctagacttagctttgcctctaatttcccctgtggaccagctctggcctcaagtttgcatgcttcctgcaagaaaacacatacttgctgggctcatctttctttgagggcagtttggggaccatcggcaattgctctgtcattttccctgggagtttcacctcacacatcaagcagcttatcaaaaatttctttgcagttctctcttagagaaaggttttggtacataccattttcttcattttgtaattgttagggatgattaaatggcccttgtagattgatgcttggggcagcctgctagctaggtattcctgagtttggctctaccattagactgtttgcagtgggactgtcctttctgcactttttgtctgtttcataccccgtacttacacccctgaccctgctactgcatgatcagtgcatgcatgacaagagaacagtgctgtgcacatactgggtgcttaataatggcttgaacaattgtgtctgctgttttcttctttcttttccctcctgatactcttccaagggagtctgtatggagtagagtaaaacaaaacaaaaacttcacatgggctttagtgtctgaaggcctaagtttgagtcccagttctaccttttattagccattttctccctaatccttgactccctcatctccaaaggggaaatagttaaaagacctgtttctccgtcttaggagaaacagatgcaccattgtctgtgaaaatgctttgtcaatcatgagaggatcatgccatttaaaaaattactggattaagaatttaaggagctgtcctttctaaggcagctgaattattgtccaaactcgccaaccctagttgattctatcccctagatatctctagaatgagcccatgtctccaaacctcatgggcattccctttttctagccaagctgcctttctttctcctgaagaagtgcagtatttgtctcttgggtcttatgcctctagtcttattcttttcaatccagagtcaattctctaaagggcatatctgatcttgtcaatcccatgcctaaaatccttcagtggctcttcattgccctcaaaataataatccaaacattccagttatgtgattttggataagttcctcaaattttctatgccttggtttcctcatctgaagagttgggatagtaatactcacccctagagaggtaccgtggtgaacacatcatgagatgctgcttagacagcwtctggcacagtgtcaggcttgcggcagattatcagtgagggcttcctgaacaagtgaatgcaggaatgattgactacggtaccagtagtgtttgacaactgttacttttaggggttggacttagaaagtaggctttgcttgcaccctgtgtatcatatcctcttaacttgtggagtttcctgagtgaggatgtcaccggaaaatctcattctctcctctctctatagggaggaaccagcctcttggggtaggggagagagaattaatttccattcttctcctttggcccaaggtctatgcagcatgttccagaagtctgcttgtagtgggaagtaggctggtataggaatgaagaatgtattttctgtctcggtgggcccttccagtgaataggacttcccttccctccacttgggctgtaagtgattttgatagcatcaactagactcacccaaagccacacggccgggaaggagcattctcaagaaggagaggatctgttgttcaacaagtcttattctttggactcctgaaggaagctttggaagtcaaaggagaaaaatgagctttgtttgaagagggcattattcttcctaagagcaataagcccaacattctctatgtcattcatcttcccaacatccctgtgagctggggagggagtgctactgccaacacatcttatagatgggacaagagggtcacagaaatattcatgactttctcaagtttctgcagtcagtggtagactctgaaataggcaaaatatcttgttattctcaaaccactgctctttcctgagacagcaactctgggggcgaaaacgaggggacagtgagactcagcccaccttctctttgcacaccaagcctctgttacatggaggaggaagaggttgtcttcaaatcactgctgggttcagtatcctttaaggagaccttcagatgtttcctctgcctatctttcattgaatggttgctctgtgagcattatccagaaaaactttcccaggagatggccagacagatgtgaaacactcagtaatatatccagagctcgatggaggaatcccatgcaatcaggaagccaagtagaaggcagttgatcactccatctgctgttgttgtctttagtccagaactggacctcagaagtaggattcaaaagaacaggctcatcgagactcctcagttatattatacttttaaatgtactttctcaggaaattaagccttccatgtgtgctagcagagaaagatttttattttgttttgtttttctaaaggatgttttgaaggttgctattaagtttgtggttgaaagataatgaacttaggtagccgatctgcagtcaaatataccaccactaaaatataaatatttgttcttttgcagtcagtatctgcagaacagtaagcgaaagagccggcctgtgagtgtaaaaacatttgaagatatcccgttagaagaaccagaagtaaaagtaatcccagatgtaagtacgtcttttaaaaatagtcttagaaataatacaaaggatgaaacactagctagataaatattagcctaagcattaaagttttggagcctcattagaaggctgccctcgagtgtgtgtatcatggggtcattatggagatggaactttgtttttttcataagtaaagcccttggtccaaggttcaagacagtgtagctttctgaccaatttcactaaagtgcaagtagtgtcatagtgaagacagcgatggtaacaggcattctcagctgctgatttgtaaattttctcttctccctggcctgtgtctactcataggaagcagttgcttccttttgtagcttggacaatttgtggctatgatacctttatgttcttccacaggaccttatttgatagacatgatagatgggttgagaaatcagcttaattaaatagttggtcattttatatgctcaattaactgtgccatctcattgtctcttaaaaaggacaaccagacggacagtggtatggttcttgcctcagaagagctgaaaactttggaagacagaaccaaattatctccatcttttgggtaagactcagccayattaaaaagacaaatttcaataggaatttttggaaggaacttaggactttcagtgtaagtgcagaattttccctatggggtctttgttggttggagaaattagcatcaatttaacaaataaagaatggaaactaaccacacaataaaattaagtgataaatctaaaaataatctgaaataaattagagaatttggtcaatttttatgagaattcatgaatactagggaatttctgtgtatatttactgtggtcagtaatggctaaatgaaaaaggtgattggatgtgatccgtaaagctgtcaatatgattacaatctttgtggactctgaagaatttttaagtctgtatacaaatgggtgcatctgtgcttaagaagtatgatatataaataagccaatatctatttgtttgagacatttaaatattattgtctgaattcgaagtatttcattgtgagaaaagtattaaaattagttttaaatataatctcccttctatggctcagtaggaatttgtaggtgtcttgaatacgtgtacgttctcttaacataacaaatcaatgaaaatctatatttataagaataatagaataagtgtagttatgtatttgctggagtttatttgctagagtattcttacctaaaggtaagaatagaggaggttttgatctgcttataatcttttatataaaatgggaatactcatgggtttttgaataatgctcataccaaaaagaaaacaaacaaaaaaaaccccaacatattaaaaggtgccattgtgctattttattgttttctttaaggcccaaggtaagaaattgtgaaagtcaatgatatgtttcattcattgattcaaaaaatgtttattcggcaagtatcatgtgcagagcaccatgccattgcttgagacacctacattagttttgttggggttgaattgaaagaaaaaatkgtatttctcattatttgaagtaacttttaaactatgtataaacacgagttactaaaattcccttttgcagttttaacatgaagaagttggggaaaacacctattaccgggaaaaaacaccttagaatggcttgtgaaagtgtaaatcctgaagttttagatcaacacagcctgcatttctaggctttgacatgattaccgtctgtcaggattccatgccattgaaaacattttctagttgctgctgagtgacwggggttctcagtccttccaaggaatgtggttttgatgagtaaaaagcagcgtttgatatgtctggcttgactgcacacatgcttcaagttattaaagtttaaagttgctcaagagctttattacaaccatacacatgccccgtaattcccaaattgccacaataggaaaagcacaagtgaaatttaagaacatcccaatttccttgaatatcatgcaagtggccctttggygcctgtcactgtatacaaatttgtcaatctgcgaggccataaacatgttccatcagttggggcctttgcataactcgagagaactgcctttcatctcatttgaggcttgaaagacttggacctgagtaagaggacttatctgcaactactaattcatgcgagtacctgaaaatagaccttgtccctgtaaacctgctatgctgattaacaactgggagagatacggggctgcggtctccagggagatggcagccatatggagttgggaatggggtgagggtaaaaagcaaaagaattgtcttctctctgccaactcmtttgtttgccatttcttctgcagtggaatggtgcccagcaaaagcagggagtctgtggcatctgaaggctcaaaccagacaagcggctaccagtccggatatcactccgatgacacagacaccaccgtgtactccagtgaggaagcagaacttttaaagctgatagagattggagtgcaaacyggtagcacagcccagattctccagcctgacwcggggaccacactgagctctcctcctgtttaaaaggaagcatccacacccccaactccyggacatcacatgagaggtgctgctcagattttsaagtgttgttctttccaccagcaggaagtagccgcatttgattttcatttcgacaacagaaaaaggacctcggactgcagggagccagtcttctaggcatatcctggaagaggcttgtgacccaagaatgtgtctgtgtcttctcccagtgttgacctgatcctctttttcattcatttaaaaagcatttatcatgccccctgctgcgggtctcaccatgggtttagaacaaagacgttcaagaaatggccccatcctcaaagaagtagcagtacctggggagctgacacttctgtaaaactagaagataaaccaggcaatgtaagtgttcgaggtgttgaagatgggaaggatttgcagggctgagtctatccaagaggctttgtttaggacgtgggtcccaagccaagccttaagtgtggaattcggattgatagaaaggaagactaacgttaccttgctttggagagtactggagcctgcaaatgcattgtgtttgctctggtggaggtgggcatggggtctgttctgaaatgtaaagggttcagacggggtttctggttttagaaggttgcgtgttcttcgagttgggctaaagtagagttcgttgtgctgtttctgactcctaatgagagttccttccagaccgttacgtgtctcctggccaagccccaggaaggaaatgatgcagctctggctccttgtctcccaggctgatcctttattcagaataccacaaagaaaggacattcagctcaaggctccctgccgtgttgaagagttctgactgcacaaaccagcttctggtttcttctggaatgaataccctcatatctgtcctgatgtgatatgtctgagactgaatgcgggaggttcaatgtgaagctgtgtgtggtgtcaaagtttcaggaaggattttacccttttgttcttccccctgtccccaacccactctcaccccgcaacccatcagtattttagttatttggcctctactccagtaaacctgattgggtttgttcactctctgaatgattattagccagacttcaaaattattttatagcccaaattataacatctattgtattatttagacttttaacatatagagctatttctactgatttttgcccttgttctgtcctttttttcaaaaaagaaaatgtgttttttgtttggtaccatagtgtgaaatgctgggaacaatgactataagacatgctatggcacatatatttatagtctgtttatgtagaaacaaatgtaatatattaaagccttatatataatgaactttgtactattcacattttgtatcagtattatgtagcataacaaaggtcataatgctttcagcaattgatgtcattttattaaagaacattgaaaaacttgaaggaatccctttgcaaggttgcattactgtacccatcatttctaaaatggaagagggggtggctgggcacagtggccgacacctaaaaacccagcactttggggggccaaggtgggaggatcgcttgagcccaggagttcaagaccagtctggccaacatggtcagattccatctcaaagaaaaaaggtaaaaataaaataaaatggagaagaaggaatcagacataatttccatgtggttgttttacatttttactggttttcttactcttcttataagggatattttcataaactgattatatattttacaaaccaataaatgtatttgtagtacaaagtatgagggtataatatcaccacaactattttgaggataagtatgnnnnnnnnnnnnnnnnnnnnnnnnnnnnnnnnnnnnnnnnnnnnnnnnnnnnnnnnnnnnnnnnnnnnnnnnnnnnnnnnnnnnnnnnnnnnnnnnnnnnnnnnnnnnnnnnnnnnnnnnnnnnnnnnnnnnnnnnnnnnnnnnnnnnnnnnnnnnnnnnnnnnnnnnnnnnnnnnnnnnnnnnnnnnnnnnnnnnnnnnnnnnnnnnnnnnnnnnnnnnnnnnnnnnnnnnnnnnnnnnnnnnnnnnnnnnnnnnnnnnnnnnnnnnnnnnnnnnnnnnnnnnnnnnnnnnnnnnnnnnnnnnnnnnnnnnnncatccctcccacacaccccccaacactttttcatattatattctaagcactttagtagtattgttaaaacagagtatatgtgattccttggccctccagtgaactccatatctgttagaatagccaatcatgaaactcagggggtgaaagaccctgagacaagtgatcagacccatggcagtgcagggaggcatggaccagatttacagtctctaataatattctactctatacttacagagtcagaacataagatccattattgccattttgaatgattaccatcacccaaattcagtaggtggagttatttaataaattattggcccaaataagtgaccttattttttgtgattttttaatacaagattttgaaatgtttatctagtcaaatatgcctctccctatttttaaaaaatggctcctaggttttaaaaaattttattagagaaggtctttccaattctaaacccccaattctaaattttcttcttttattgcatttaaatccatttgggattatttgcatatatggagcaaagtgaaataggagtctaactttattctttttttcaagcagattatcaatcatggcagcactgtttattaaatatccctgttttccctgtggttggcaacaaccctattgtatcattgttcaaaactagcacgtcactgagacgttctgcacagctttgtgatgaagggtggggctgttgctgttgtgtgttcttggggatggcacttccagattggggatgagaacattagggtctcctgaaagacactggtaaactgtgggtcaggctggccttgtagagagttcctcatctgttcctgttgttacagtctctttcagtaaatgaatggaagagtctaggttatttgggatggagaagaccttgtaggaaaacacaggattttcttcactttaagaaaaagagaagattttctttttcataagtggctctggcattgcttccaatgccagaaatttggattcagctgaaacttcacactttattaagaaatgctttcagcacctcaggcagaatgattaggaggtgaggtttggccttcttcctctcttttctgtcttccatgcctcttgttcttagcatttttttttctcctcatttgcccctgtattgaagaaaagtctgtggtttctaaaagtgcttcctgcagggtcttattttcaaagctttccttggaggcttttggtgtgttttaggtggggctactgtttctccctctggcttctgccctccctccttctctcccttgatccacttctgtccttctccctccctttaaaccctcgtctcctcatcttccatttctctctccactcaccttctwctctgcacccccgaccccagcaggagaggtgagagctgtggggaggggygggtttcagttcactaccccggattaggttttcctatcaatgcacattcctttgtcctcttcaacaaaaggacgaaaagcaaaaaaccacaacccacagctttctagttgctgacttaacccaattttcctgtacccccagcatgtctttctttctacctttgactcagatatttatcagcagatgataaaatgcaggcaaacccagaaagctaaagtctttggaaaaaaatagctgttcttacacatctttcctcatttgcatgggcctttcccttaggggcactgggcaagtccatgtattcttgggtatgcagtgagcacagctcaaagggggttctaacacatttttataagattgcgtttcctaaatgaatctcttccatttaaggatttaggcataattaaaaatctgtagcgtttttgtgaaagcaaatttaagtttaacttttggaaaagttacagactgctcttaggtgctaaaaaattaaaatggtaaaatacggtttaccctgtttttgattgaaatggagaaaagtggcagaatctgggaggagcaacccggagagaaattaacagccaagttgacctgaagttctggtagtagaacatactggccccaggagaggtctaactcagagataaggggggagttatctgagttaggaaaaagtattctaatgaagactactgataagacaaggtttacagtaaactgtggttgatatcaagtgaatgttattgagaagacatcaaattgcaccatagattttatttgctttataacgcaacatatgactttcctgtaattacttaatgcctcctagatgttaaattcagcacttttgtgaatttttttgtttaaaaataaaaaaagaaaagaaaatatgtggtttaattttttattttatactcacctgttgtttatgccaagcattttagaacatagaatcagcgtacttaccaaaagctggtgacagtggaccctcatcccttaattgtttgaagctctcaacttttagatattgcaatagaaaaacagaataagaaaatggtttttactctaactttatttcattttttgctctgtttatcttttcctttcttcaggaaataatattttgggggaataaattcaggaaagacaccgattcaaaaaaattttcattacatatttactgtttggtgcaaacgtatacaagagctttgattatctctaaagaaaataaatgggcagggannnnnnnnnnnnnnnnnnnnnnnnnnnnnnnnnnnnnnnnnnnnnnnnnnnnnnnnntcatgatttcagattttagttagaaaacacatgtatttgtagaaaggtccttttgtgggttgagttcttccagttaaaggtactctcacaatgtctgactctgggtctatgcgcagctcacaggatccagacatggaatgactcaccaggagccctccgaacaaaccttaccaggagaggtttaacgagattctggtgctttgcacgggagatctctttaagctgaaataacttatcctgacaaaggggattgaaaacattccattcattgccacagagagaacataactggaatgaaaacccagatacgaggcagagaactcaagctagacagaaagtgaacatcaatatctcatagtcactccccaggttaacaagaaaactggcagacatcccaaaacacatagtggggaaaagcaaggccttccgtagaaaccaagtgtcacgttcagattcagcccttaatactaaacattaagtgagtaatatttaatttatatatatttatttgatcatatttaattgcatctataacgtgcttaaatgcgccagacattattttacagagttggttaatatgaactcatttaagtaattgggaccctaagcaagatgtaggtatcacagtgtagaccacgtgggtaggccagagtaggatgcacaaaaagagtgtcattaatgatttccacaagtgtttgttaaggatttactatgtgccagacaacctattaggcagtggtcaaaattatttccttaggttcatgggttaagggttatcagcagaaccacagagaggaggaaggccactcttattccagaacagtctacatatctttatggtcttaccttgatgaattgagcatagttctcactattggctcagttattctttattcagtcattcttatgtaaagagctgagttcaggaacctctttaagtatcgtaatgcatagatttaccatggaggcacctaagctgactttagagtcagggagctcatgggaaaaacccaggtaagaaccctgttacagaaggctgaggaaattaggcttatttagtctggttcacctcatgttgcaaaatttgcatttcacttgtaaagcaagatgagattgtgttggtgctctggaagaactccgtgttagcagggactgaatggcaacatggaaggaatctttggtgtaatcgttaagcaatgctatattgtcctttttactactgttctgtattttactttactctttttttttttttttttttgagacagggtctcactctgtcacctgggctggagtacagcagtgtgatctcagctcactgcaacctccgtccccccaggttcaagcaattctcctgcctcagcctcctgagtagctgggattataggtgtgtgccactatacccagctaatttttgtatttttagtagaacagggtttcaccaatttggccaggctggtcttgaactcctgacctctagtgatccatccgcctcgccctcccaaagtgctgggattacaggcttgagccacagtgcccatgctgccttttacttttctaatggatgaacatacagagtacagaaagaatacgttctatcatctcattagttttactaggaattattcagtaaggattgtttcatataatgatttttttcttggggatttcaaaaacattatcaagcaacacacacaacacttcacaaatacacctgtttcaccaagcaaagggtacttctgtataaatcaccttgagaatcttttcagcagcctgtacttgagtcaacagaaatgaattttccctcaattcaatcattgtggatagatcatgatgtattgctgtgctgttcccctgctcctctgtctaatatggttggcaaattaccttgaagatctgtcatgaagagagaaaaaagcatcctcattcttctcttatcttcttattcatcagtgaatttcagagtttggtccagctttttttcctgtgaccctttgtactggaggaaggcttattgcttctttgacaaaggagcaaaatgttatgccagaatccattcgtaagttggctcttacaaaattagttaataatgctcacttaaaaaaataccagtgagcattaattttggacaacagatatgctggagcaagtttaatcacagcataatagaatttaaaaataaatatatataatgtacttaatttgcattatttctctctatttcatggtgataggcatctaagtagctctgcagtcactcagacatgagcagctagaagggtggagaactgctattgatcatctgccacatgccaggcatcgagcctcatatattatctcattaaatccttgcaaaggcccttgcattaggtgctgttatcaccatgttacaagtgaagatgggcagttaaggcttgaagcctcagtatgaaaggtcacatataccagcattgaatccagtctactgaagacatgggggacatgttcttacttgagataaaagccaggatgagatctctcttgatggcaggcagtgagctgactcatcctataataaatcaatcagccaaatgacaggtacatattaaggtga

SEQ ID NO: 8787 - DNA, 134003 bp, Homo sapiens
  misc_feature (1)...(134003): n = A,T,C or G, or insertion/deletion polymorphism (see Tables 1-2)
ccacatatggatcctcctcagtggtcagctctgtgcaagtgacacagccatcctgaagcgcctgctggagaagtgtgtgcagatgagttctgcagcacccttctccccaagcttctggggccaagcgtggtttctgtgatgctggggccacactgccttcagacaacactgtagcagtgttggtgtgtttttatgcagcagtgttctggggagggtgtgcaagcccacctgcccagccagccatttctcattagcagtttgaaggccttactttacagtacaggtcttgacatttttctctgcttcctcacattgactatttagttccttattctaaaagttactaatgcttagaaagagaataaagaaggatccgtctcttgctgtgctgcagtaaagaggtaatgcgccccagggccgagggattgaggaggaattccatttgaacatcatcagcagtgaagtttcttcccaatgctgcagtggactttcatattagatgagtgtagtgaaatattaagttcatattctggtttcttgggttggtcgtagaggagtttagttttttattttcccaaagcagacagtgaaaaatattttaggaaaggtgattttttttaaattgcaaaatagaaatgttagcctctacccgttactgtggatggtggactatgcttttgtctaaaaagccatgtgctgattttccagcagaaggggaagagttttggtagccaagtctgggcccaagtcctagctctgtcacttctgagttatttgttccttggcaggcctttttttttttaatagattttattttttagagcagttttaggttaatagcaaaattaagcaggagataaagagattttccatataccctccacccccacatacacacagcatcccctactgtcaacatttgtcactagagtggtccatttgttacaaacctactcagtacatcattatcacccaaagctttggcagacttttgagctgaattttccaactttaaaatggaaatgacatgtcacggggttttcttttattattaaatgagactatacccacaagagccgagtttgtagtaggcaggaccaaatgtcagtagtgcaaattgtatcggccaccagaaatgtttttaggaatgaagactgcaaagcatttcattcacgttgaaagaagatggcacaataagctgagtcccccacagattcttggttgtttactttgccactttcctctgggtatctgggaggtttcgctggcaggagcagggatgggcagaggttggcaccaggttcctgggaccacagaacatggtgcgccaaggactgttcatggccttgccgtgttcctagtctagcctgtgtgttcttgcctctttaatacttgtttataagcgcacaaagcaaaacaaatgtaattttcattagtcaaaatttatgtgaaacagcctcagcctcccgagtagctgggattgacaggctttgacaccgaggttaaccgacagtcacaacaatggggttacctgccggtattctattaatgtatttttttacatttctttagagatagagtctcactatgttgcccaggctggtttcaaactgctattctcaagtgatcctcccacctcagtctcctgagtagctgagattataggtgtgcgccactattcctggctttattaaggtctttttaagttttcataagcttagtaataaacttaaagtcttaaacttaagtcttagtcttaaatttagtgttaaagtcttaaatataagtcttagtcttaatcttaaagctgagtaattattaaacggatagtttatgccacgttactattatgtgacaacaaacagatttttctttgggatatcagcaacagagtaccacagggtcatctcctctcaagtgaatctgtcttcttaagatcagtctcatgaacaagggtatcttgttgtggccctgcatctcagctgcagccatgttgacgtctgtctgggctaaatgaaaatgaggatgtaagtcgctgcttggaaagtgtgcaaacgtgtaaagatttcctctgtgagccacatatttgagaagagagtttgatattccttaagctaggaaaagtgttttttatttgtctagtgtgtcatgttctcgtggaagaggaagcaatgttaaaaaacttgttttaaacatttttgttataaaataaacacacataaaaacatgaatcagatatatggcttaatgaattataaaatgaacactgtccagatcaagaaataaaactgtgccctgcccacctaagaactccttctctgtgttccatcccagtgacagtccctctctcccatcaagaagggaccactttagtaataacttcctggtgttttctctttatggttttatcagtggaatgtgcacctctagggagtacaggttagtcttgtctattttttttttttagcagtagatgtttagacatgactttcttataatgagtagaagagaaagaacctgaagaaatttttaaagctatacttaagaaaacataaatgagaattatacagtagaataaataagagaaatgacttctaaaaatgtatttcagttgtataaatgtttacagatttgtagcattacttaagggaaagaatgcctttggtgaccaaagtaaaacatcctatcctttgtttcagaagaacccactgttggtggttctatatttaataaatgttgtgagctgaccaagaacatatagatcacttatttttattttcatgttttcacgttggaggaaccttcaaagtggaagtcttcttcatttgcattctcttacttttgcattaactactcaataaataaaagtttgtgaaaaagacaaatatcatatattctcactcatatgtgggaactgaaaaaaagtgatggttaccagaggttgggaagggtagtagggggtgggaaattaagaaggattaattaatgggtacaaaaatgcagtaagaagaaataagatctattgtttggtagcacaatagggcaactatagttaataccttattgtatatttcaaaataactggaggagtggatttggaatgttcccaacagaaagaatttgtaaatgtttgaggtcgaggatatcccaaataccctaatttgaccattacacattgtttgcttgtataaggatacaaaacttgagttagacagcagtttagaagatctattatatagcatggtgactctagttagtattgtatttctgaaaattgctaagatacataccgtatttctgaacattactaatttttgtggattttaagtgttctcaccacaaaaaatttgaagtttgtgaggtcttgcatatgttaattgcctcaatttggccatcccgtagtgtagacatatttcagggcatcatgttgtacatgataagtatatacaatttctgtcaattaaaaaataagaaaaaaaatcacataccccataaacatgtacaattatgcactcataaaaattaagtaaaagtttgtggaactgaaatgaaaaggctcgtttatgattctcagaacttcatatatctcatgtttaatattagtgttgcaaaaacggtaattttgttaaagtgttgttctgtttgtggttgtagtcttttgtcttttgctgttatcatctttacagtacatttcatgatgtaccagttcatgttttttggtgccagtgacattaagtaaatacttagcaaatgtttacagtaagaatttagttccttccctcaaggagcatccagcatggagaaagacagctgaagatgatgggtaactgccaacctgtgccaaacgtgcagctcaggtaataaatgtgtcagtcagtggctttgtttaggaattaggatgggaccttgcactgccttgttgttttgttcatagtactcacattttgcttctcccggaggatttagctcttcattttttgctttcttgtttgataaattggacgtgtgcagaagttcaaaaggttgtctttgtgggtaaggtttaagtgtacagtaggaaatgcctggcagtaagtcactgagagcctatttgaaattaagagattaaaaaggttcttttctaggtgtggtggctcgcctgtaatcccagcactttgggaggccaaggtcggaggatgagttgaggccaggagttgaaaaccagcctggccaacatggtgaaaccccatctctactaaaaatacaaaaaattagctgggtgtgatggcgcatgcctgtggtcccagctacgccagaggctgaggtgggagaattgcttgagcccgggaggtggaggttgcagtgaaccaagatggggccagtgcacttcagcctgggcaacagagcaagactccgtctccaaaaatagccgggggttcttgatttgcttgtcttgatgacaaaataagcatgaaaaagaggaaagggccaggagactcggagcaattaagttgtcgtgcaaggggactgggctagaaattgagtgagattaactctttaaaaggttacagattagcggaagactctgagagtgattgggtgagataaaataatgcgtgcagtgctacatgctttgttgattaaacaccgagcatttgtatctcacctccaccagttttgccatattttttgccatactatgttttattgtattaaatatttaaaaattgatttttaaacataagacatttcacaagggaagttgccataaataatagattattaataaatattaaaaacaagctagtattattaattttagctgatacttaatactaaatatttagtacctaatactagcctgatcttcgttaaaaacaatgaagacacattttactatctttgtgtgtcccgtgccatcatgttgcagacttcaaatatacacaataaaatctgttttaaaaaatatatacccaatttgaatggaaaaataaaatctacagtgcattaaataaataatgacaagcatagcactgttagacttaacagcttgcaagcagagacctttcccttggcacaaaaggagagttgaaaaggacctgagctcctccctaggccaggtgtttgaccttcttgggccctcattgtcatctgttaagtgggctgtggatagtgatgagggggttattgtgagtatgggggttattgtgagaatgggcaggagctgggaagggcctgaccaggggcaggtgcctcctgctaccaggcatgtggtccttgttacccttatccaggctgtcattcagttccatatgtgaaattacatcccagactaccagtggcacccactccaccctggcgagacacgttagaaaaatcgcgggttacaaagctggcaaagacaaacctggctgttttcatctcctttattggcatttttcctcagctggagtagccctttactccacataaagtcagcagaggggaagaacagctgcacgaatgcctcagctcttgctgtgcactgcctgacacgcgttgatgctgtgctttgtggagcctgtttacgtttggtagaaatggcaccatctagtacttaaaaaggatcatcaccacaataactgtttgggctggtggcgagaggtgtgccagggagtgggcagcctagggttggtgtggcagccctgggctctcttgcctctgctgggtgggtgggtggtggtgatgtcactcgtttgtgaggtctaacaggttaaatgagttaatgggtatgcctggctcatagagcatctggaaatattgttattgagggtggtgcttgttattttatgctccacctatgagtgcctgagtagaaaataatcttttgtaacactttcttttgacgtgattaagactcacagaagttgcagtaatagtacagaggattcccgtgtctccgataatttgtcttttaccttgttttagtacctaaataatgtgataattccttcatgtggtttttttttttttcattttagtgttttcttcactcatggtgaagaatgggggagatagaaggaacatacagagtcctgcagactgcagggatgcrcttgggtgcccagacccctgtgggagttagcacccttgagcctgggcagactctcttgcccagaatgcaagagaagcacctgyacctcagagtaaagctgctggacaacaccatggaaatatttgacattgaggtaagaagcatgatttttggaggcatatttccttatatcttctaacagtcaaattatgtaccaaattccattttgctggttagactttgcatattaagttgatcaagagtagctttggtaacacatgagaaaatccttagaaacagtaaatctgaatttctccttttatttggaaagtggtattgtatcttttgtttaaaattgtagtacaatttggtctttctactcatcttctttcgtgagaggctggctaagagactgctggaaggtgcagactggagccagatggtacacccagaccttcccagcttaagccacctggtctcagcgaggcccaggccacctggatgcggggatgccacttagcttccatgtgtgtcagcttccttttctgaaacagagggacaattataatccctctttctcagagctgctggtgagaggattgagcaaacacacagagcctgtcatgcaggaggtgttgtatggtgttaacatataacttaattttctaggtcaatgataatacagtttttattttgaaaattccctgatagaagattgcactggtaatattagcaagaacaattaaatatactaagaatatatgcatatatcaatatttaagtaacactattttttagatccatgtgatgtattagaaaacatttttttgtttttctacatgttattagcatgaaagttctttttattcatcttttacttttttttttttttgagaaagggtgttgttctgtcaacccaggctggagtgcagtggtgcgatcatgcctcactgcagcctggacctcatgggctcaagcgatccgccctcctcaaccccgggagtagctgggattacaagcatgcaccaccacgcctggctaatttttgtacttttagtagaaacagggttttgccatgttgcccaggctggcctcaaactcctgggctcaagggatcctcctacctcagcctcccaagtgctaggattataggtgtaagccaccgtgcccagccaaaagttctttttaaaattatttattttcatatgtaatacacaaatacattctcttttttctaattttttctggctttcaagtaacatctttagaagcttttcttgctcttaatggcacaaaagtaaggacaagagaatgaatttaaactagcaggaggtttatttacacttgggaatttcttttgaggagtcaagatgccacacagaaaacaaaactattattgagctgtggaccttattgcggaatgcattgcatggggtgggaaggagggaagagggaacacagaggaggggagcttggtgggtggggcagtgaagctctgagcaaggtggtctctgggtttgagtgttgtttgaaggcaagtatggagggtgtaagaactcagggaacctgggtgcttttctgaagtgcttatctgaggaggaagtgaaagataatttcatcagggccatggtaactgaaactggtaggacctgtctgtccaacttcccacatcacttctgttgcagagaaggaggtctgaagctgggcaacctttgaaccctgaagagtagcagtcggctgccctttcaccagctcttgggtgactttcctgtaggaaataggttaaagtctggacacttaattaggctcccaaatctttttcttttttgaggcggagtcttgccctgtcacccaggctggagtgccacggcatgatctcggctcactgcaagctctgcctcccgggttcacaccattctcctgcctcagcctcccgagtagctgggactacaggcgcccgccaccatgcccagcttatttctttttttgtgtttttggtagagacggagtttcaccatgttagccagtatggtctcgatcccctgacctcgtgatccgcccgcttcggcctcccaaagtgctggaattacaggtgtgagccaccgcgcccagccccaaatcttttcaatcaagtgtttggaggaatttccaccatgtagtcatcctccaataaacacatttaccattgtctaggcttgtaataggtgcaaaatttaagagaaaaaaagtgaaagaaaaataattgtactaataggtttacttttagagtgtcttttttttttgttctgcctactggactttatcaactaaaactaggacccagaagaaaaaagcacacatttgttgttgagtcataaataagatgtaaattcttctctaagaaattcacctttactgagtatgagtcattttatacctaagaaaataagagatgccattttgtgaaggttttacaatatttagagcttgtcagttttaataaattgagattatggtttcagttaaatataaccgtcatgtttggtatttgagatatctggcagagttaccagaaattaaagaacttttatctgaagcaaaagaaaatggtcttgcatattctgaatatcctgggttggatggggtactttttttttttaagagacaggatcttgctatgttccccaggccagcctctaactcttggactcaagtgatcctcctgcctcagcctcccaagtagctaggactacaggtgtgagccactgtgccagcttggggtattttttacattgtgttgcctgctgatacacacctttagggagagctaaaattcaatatattgtaagttggttgtattctgcttccaagtaccctgtcctccacaactgcatcagttagctttgttaagtaacaaaccatcccaaacatggagcttaaatcacaggtctgtttgttggtttggaggctctactaggctgacttggagggttgggcaacctgggattgccttacccacacatttggcaccctggttggaacctcatgtgcagaatctcattctccctccagcccacttggcctcatttttgtggtcacagaaacrttctcagtccagaagtgggcactgcagtgtcctttgggctcttggcttggagtttgtccattgtcacttctgccacattttattaatcaaagcaagctaccaggctagctctgattcgaggggtggagaagtagaggcaccttgatgagagagcggccaggaattggtgagcattttttgtaatctaccctgacaaatattgccagtgtaccaggatacagcctctggaagtgcaattgtctgtgccactctaaggtttggtgtcagtgggctggtgtgtagggcctgccctgagtgggcagagtccccctcctggggaagtccaccctgcatagccccacagaggcaggcttgtcccgccccccttccttgttgtctttggatcaaggctggttgcctgacccgagcccaccatcactgtcttgctgtcgtttgtccacttgtctcattcgtattctgtctttctgcctcttgactttacattggaaccaagagacagactgtggtcaggtggtttttgctgttggacctgtagactgaggcagacattcggctacagggtgtcgggtgcactgagcagtgagacccctggctgggcaggtctgtcttggtgaagacaccacatcctagtgcctgcttgctgtctccctgctcctgaaatgcaagttctgggaaggaaaggctgtattgtatctacttctgtgcctctggtgtttggaacagggccttgctgagtaaacgtgttaaatgaatgaaatcgaaagttagatttggttaacagactttaagaatgttttgaatttttccctctatagcagtgttttctaacctcaggaattcaattttgttttgttttggggttttctggccatatgcacctatcttatttgtcagtttactagattatcatttcacttaagtcttaaacagtagtgttcttccagggagatgtgctgatattaaacttgaaaagcactagcttcttctgtattctcatggccagaaaacactgacattgtgtggtgctgtgcagattccccaagttgatattggaagtttacatttcaggagcctttttaacataggggaaattttgatgttttgttggtttctttttttttttttttttttgagacagagtctcgctctgtcgcccaggccggactgcggactgcagtggcgcaatctcggctcactgcaagctccgcttcctgggttcacgccattctcctgcctcagcctcccgagtagctgggactataggcgcccgccaccgcgcctggctaattttttgtatttttagtagagacggggtttcaccttgttagccaggatggtctcgatctcctgacctcaggtgatccacctgccttggcctcccatagtgctgggattacaggcgtgagccactgcgcctggccatctggtgtactttaactcatctctagattacttataatacctcatacaatggaaacactatgtgaatacttgttatactgtattgactttttttttctattatctctcattgtactattactttttatcattttggtggggttgtttttatcctttttgatcatcaggtggatttatcaaatctgtggatgccaaacctgtggatacagaggactgacagaatacctaggagtagaattgctgggtcayatgggaaatctaggtctaatcattaaaggaactgccagactgttttccaaagtagctgtgccattttgcattcctgccagcaatgttatatgttccaatttctccacatatttgccaacacttatttttttctgacttttttattctagccatcctagtaggtgtgtagtagtatctcattgtggtttgagatgatatttttatttttattttattattttttttttgaggcagaatttcactctgtcgctcaggctggagtgcaatggcatgatttcagctcactgcaacctctgcctcctgggctcaaacaattctcctgcctcagcctactgagtagttgggattacaggcgcccaccaccatgcccggctaatattttttttttttgtatttttagtagagacggggtttcatcatgttggccaggctggttttgaactcctgaccttaagtgatccgcctccccscctcggcctcccaaagttttgggattacaggtgccagccaccatgcctggcctatttttttttttttgagtcaggatctcactctgtcacccagactggagtgcagtggcatagtcaaaactcactgcagccttgacctccccgggttcaggtgatcgtcctgcctcagcctctygagtagctggaactacaggcrtgtaccaccatgctggctaatttgttaaatttttgtagagatggggtctccccacattacccatttgtctcaaactcttggtctctagcaatcctcctgcctcagcctcccaaagtgctgggattataggtgtgagctaccacacctagccagaagccaactcgtaaactgatttttgatcaggagagaaatctgtatgatgtatttagggtggaggcctatttgtggatgttgacttcaattatgttttattttaagccacttttggcatttattaatgggatatttagctaatcaaaggtcagtgactagtttttttatctaggaaagtcttgatttgtttttagttgattaaacaaattctgtggttttgaacatagaaatctggcctcagctctaaagaatcttgtttttgagccataattgttttaaaaccatctgaaagttgtgtgtcagcttgccttgtcttgtgtgctaagtcatcgggtagaaatactttcagctccaaaccatgccaggtgtgaaaagtgtctaactccattgctggatgcagtggaaggagagttgaggtgcataactgagaccccgttctagaaagtcttcccagatctttagagggtaagatgtctagaacaattatactctcattaattcataattaactcttaggtttaggagttaatgcgatttaaaggttttctattatctgaaagttagtattatggagaagagatatgtaatgattaaaagaacaacctgggatgcagtttaagggtgtgaggccttgcccctggcagcgaatgtcctttrcctttgctgacaagtggggattgcatstaatgagcatgagggttttcttcattattgttcatctactttctcacgttccccttttctttaacatactcacagttgttagggtggactttccttttctttctttttttctttagaattgcagaggctttaggttaaatagtgacaagtaggaagacaaattctcagtcacgaagttctgtgctagaagactttaacttgctattccagtaaaaacttaatgttttcattctggcaggaagaaatagtcaaaattccagaaagtattgtagccagatgtttgtcattgctcccacacgaacatcctaaatatagcaaataaactgccttagaacttattttggtctgacctcagaagaaaaagtaactcagcttctgaaatttggggataatagaggttttatacaaaagctcttatgtgtttctgggataccaagctattatgtgactctgccctagcttttaaaacctgttattttgtcttggaaagttgatctattcctttgaccctgatgctcaagaatgtggtagggtggtgcacagcagagatgtggacatttttattcttagttttccagtggtgatgttggcactcccagagccagctcccccaccaagccctaacacacatacacaagcaaggttggtaagtcacagtctgtgttagattacacagcaagggcgactgatgaagaagttaggccagcaaatggaaaagaatagggaaatgtcatcctattgatccctgtaccagtgaagacgccatgacagtggttgtatagcagagaataaccaagttatttcaggatcgcagcagagggttgtgggaatgaaacttgctgactgggtcacctggactcgcacaccatttgttgagcacctgagagttctagcacccaatgttgatcacatatcaggtgacacaggcagtggctgacccatgtgagctgtgagcgccaactcagaaaccccttgatctactcgtgcccatgtaactcccccatttttgatcaggagagaatttgattctgttgttatttgattcgtgggaggctagaaaagctgagcttgtacaggttgagtatcccttatctaacatgcttaggatcagaagagtttcagatttttttcagattttggaatatttgcattatgcttattagtcaagcatcccgaatctgaaaatccaaaacctgaattgttccatgagcatttcctttgaacatcatgttggcactaaaattttttgaattttggagcatttcagatttcagattattatattataataataatatattatattatatgggattatattatatgggatgctcaacccatactatattttacttgactgcctctgaattgccactacccttcagttcttctcatccctcccctgaaacttcaaatgtctacattcttggcccaactccctgcaaagaggtcagaatcaggaggaggagtgggtgggtagtgcgtgttgaacatgccctgcctccactgagcaggttcttctgggcctccatgaccagtgtgcccatccccactctgtagctggcttccacctggggcaggttaggaccaggttttaaatctcagcccttacccccctgatggaatgtggacatgagtctcttccagggctggagattacattctctttcccaacatgggcccatcctaggggattgcctcgtgccgctggtgttctgccagtctctttgttctctgtgtccgtttccctcctctggaaaccccactctgctgtgggccctgtacctggcctgttgtgggctataagtagtgccgctcctggcctgttctgattgccaccgccagccactttgtcctggggtgccactcccctctagtgcccaaaaccttttagactcagctgtaccccggcctgctgcttgttgttgtattgtggagaaattcctcaaggtgctctaggcaggattgaggaccgctgactttgagaagagttcacaggctctggagcgtggacttcccacctgagctcccctcagcctgcctcatccatcaggcaccttttgctgatgccatttctttctcaccctcatttctccccttctgttcatccttgaacacaacagacctcagagccctcttctccacagctggaaggtgcagtgcttttcagggttctgctggcacttcacttctgggggcatttttcagtcatatcrgcctcacgtaaggaagctaattctacattattgttcctttttagrtatagaaagtartcatgaatctccagagagctgatggtagaattacagtgatctctgttctttgagagagtgcattctacttttttaccttaccaagtgttacatgtatatttttcaagttatatgattatttcacagattatgtgttcacagtggtttaacacttgcactgcagcatctcagctttctggggatgaagctgcccctggtgaagccccccaagtcctttcctgcatgtcgagcaaaggcccattgggttacatgctgcagctagaagaccaatcaaygccatctctcaaggttcctcatgcttctttttttagagggaattcatccaaaatgtaattcggttttcattataccattaatacttgtacgctgcagaaaaacaggaactcacagtggcccacagccaaagataactacccagagagaacaaccattcacatttttctgaatacccttctggccttttatatgttcacctatattaaacaaaattgggactgaactatgtgcatttttgtagtcttttcaaaaattaaacattatattctgaactttttttatatggtcttttaaaagtttttaatggctatatagtgttctattttcagtttctctgtacaaaatctattttttttttttttttttttgaggcagggtctcattctgttgcccaggctggagtgcggtggtgcaatccaacctccgcctcctgggctcaagcgatcctcacacctcagcctcccaagtagctgggactacagatgtgtgccaccatgcccggctaattttgcattttttggagagatggggtttccccatgttgcctaggctagtcttgaactcctgggctcaagccgtataccagccttagcctcccaaagtgctaggattacaggtgtgagccaccacacccagtctatacaaaatctttatacacattttttattatctccttggggtaaacgtatagaagtggaggttcttcatcaaagtgtatgtacagttttgaggtctttgatacatgttgtgaaattgtattccagaaacagcagaagcacctcatgcccctaccagtggtatatgcaggtgttcatttctctcacctttatggacatttcatattacaatttttagtaacatctcctgtttaataggcaaaagttaggatttttattcacattttcatcagacttgtctgttttattttttgttttgtgcagtttttggtgtttttggtctacatcatatttgaagtttaaaaataacttaagagttgggaagatactgaatacattgtgttggaagtaaaataaaaaaggaaataagaatcgaggagtgctggagacttcgcagaaagtgattacttatggtgaaggaaaggatagaaaaattacggaaagccacacagatgggatgtgggtttgggctgtgctcaccccaacagccttaggccagcacgtgtttggcaggtatttgctgagcctcggtgtgcaccaccctctgccrtcggagctgggagtgccaaagtgaacgtagcagacaggagctctgcctccttgygcttgttcggcagtggggagctcaacrgtggacaaggtayactgcgaagtgcttagtgcccaggagagaaataaagcacggagggagcaggagacatggagctgcgctcagatggagatccacatcccacactcccacagccctgttcctgtggtgggaggggccggcacagatctctgttcttgagaacagtgttcaggtggatggaacagcacatgcaggtgccattaggtgacccccatctggcacgtttggggattagcaagagaccatgtggtgggagtggagcagagargcatctaggagggcttctgctcacatggagggaaatggaactccacccaggacgtgatgacttggtccagaaccaggtcaggacaagaggggagcctttgggtgacatttgcggtgacccaggatgtggcttgggcagaagggagcaagggaggtagtgagaaccagttgcatcctggagagattttgaaggtggagcctgcagaatttgctggtgctgatgtggaggatcagaaacccaggagccaacatggtgcaaggactgggcctgagctcccatgtcctgcactagggagcccatgggaagagctgctttggtttggggccatgtggagtcgaagaggctcattaggcatctgaggagagggttctcaggcactgggcttggtgggaagaagcgttgttgctatgtcctgaaggaatgtgagctcttttcagtgcaccagatgcaaggcggccattgctgtgaccttccagaaggtgctaacattgcccttctgtgaagccaccactgttatcccgctgggtcatggtgaatgccaagtgtcagagatattctgacacttggcattcaccatgacctagtggaagcctttgggtgacattgcagtcacccaaagacagcttttctaaactgtcatcagtcttcgacttctgaacttttattcttagagaaatttagactggtcattaaagagaaacatgaaaagtatctgttggcacttccaactgttgttattggaatgctctggaatgttctatgcacatgaatgatgctttacatgtacagttttgcactttatatagcagcagctttttgccacagtggtagaggggatcccagtcctacttaaaggctttttctggtttctaggaaagtcagaaagatattctttcctccttgatccacaatcttaaacacttgcctggaactaataaacttctgaaaagctagtgatgagaatccgttgcatcctggagatgcaactgataagttcatggatcaatctaaaatatatttctttgaaataaatctaatattcctgattatgaaaaatacattccttcttaatcttctggttttagatattgatgatgttttctcataattacactttttagatttgtttggtccttgctaatatgcatccatatgctttttgcatgtattgatatttgaaactggtaaagtcagatctttgtagcagaagaaaaacctcttttttattaaagcaattttcaattaagacaactcaaacatggcttaaaggctctagacattactatcctaggaaaaatgttggaacatacatgctaaaaatacacagtgagctcttttaaagtaaacatcttaaatcaaggttattcagctttatattgtttgcttctggctttaatttacatcaattgtaaatttcttaaaaacatagaaaataatagaaacatgtcctaaatttaattatgaatattaattgtattaagaaatgaaattgtaaattgtacataagtcctaacatcatataaaattagacttgttagcttaacataagcaaaaacaaccatcttgcgagtctttcatcagctcttagtaaaacacaggatttcgtaatgaatcttcaaattttacttatttagaggaatcaaatttggagaaaactgagaacactagaggagggcaaacttgttttggaaatggttgctagaaagtaagttataaaaactaaaactcttttattgctgttaattttcctcagtaaagaaattgatgctgctttttaaatcattcaagtcaagtagtttataaaataatagtattttgttgtatmttrtatgttttctaccttagaaaattttttaatatatttcttaaattataaaatttatacatccaacaaaaaattcagtcaatataaatgagtaggatgggcacagtggctcatacctataatcccggcacttttggaggccaaggcaagtggatcatttgagctcaggagctcgagacaattctgggcaacatagcgaaactgtctctactaaaaatacaaaaattagccaggcatggtggctcacgcctgtagtcccagctactcaggaggctaaggtgggaggatcacctgagccctagtggtggaagttgcagtgagccgtgattgcaccactgcactccagcctgggtgacagagccagaccttgtctcaaaaaaaaagagaaaaaaaaattttaattacctatttgcccacacccagaattaacgtcttcaacatttacgtcatatcatccatttaactcttctagacattttttgcacttacttatgcacttttatatacacacaccccatctatatcactacttctgtccttttgattacataagtactgagaagaattagcttcccattgtgaatgtgcttatatgtatttctctctttacctcctgtaatttttattttatgaatgtcaacactatggttatttgtccaaagatatacataactgttagatcttaatggatacaaggttactgagcaaaggggctggctgcctgatgtgcatatggcaccagcttgctttgatttgatttttttagagatggggtcttgctctgtaacccaggcttgagtgcagtagcatgatcatagctcactgcatccttgaactccaaggctcaagtgatctgcccatctcagccttccaagtgccccaccacacccagccaattaaaaaatatatattttttaattttagagatggggtcccgctgttgttgctcaggctagcttgagcctgagctcaagtgaacctggccccaagtgatcctccggcctgattctcttgagtagctgggattacaggcgcgagtcattgctccccgctcagcagtggrttttgagaaaagaaaagctttattgccagtcaaccaacaaggagacaggaggccggctcagatctgtctccccattctgtccttaagacagtatatttaagggagagattttgggggaagcgtttaaagattggttagcgattgtcaaagggaaaggggaggtttggaaagccccctgggcatgtgcagctgtctcttcacgcgtcttcgtgcattgcatgtgcagattcagggggagtatggaaygtggtagagattccagctgtgctgttagcaagctccttctgtgcaggctccagctggccaccttggttcccaccaatttcacccagatttgttatcttacaaacagagggagtttcagcaagctgctgtttttcttatctgccatcctgtaagttcaagcttttctgttagtcactggtttctttaactgtttgggatatggtttcaataacactttttcctctaataagtgtccttttattgtctcacttgtrcctttttggcctaaattcaaccttatattcaaccatgtaaccaaggtccccttgcttttttgtttgtttggaatatacttgggatacccatgtccttcttttattttcagcctttctgaatcatttaatgtgtttgaaatatgtttcttatatacagcctaatggctcatgttgagcgttcgccacattctagttgctcttctaaaaccccttgtctgcgttgttttattcggtcctctctgttagaactagtcttctcttttatacttgggaaacggagggacagagatgtttttgaaagacgtacccgatactagaggctccagccagagcagctgggaagaaagaaaaggagggaggagaaaagaaaggaagagagggaggccgtccacactggaaaggaggtaaaaactgtttacacatgacactacgttgtatatagaaaagtttaacatacctgtctctcttttaaaaaaagctattagaactaataaacgatttcaggaaggttgcaggatacaagattaatataccaagatcaattgcatttctatgcactagcaatgaacaattccaaaataaaattaagaaaattgttttattggccagacgcagtggctcatgcctgtaatcccagcactttgggaggctgaggtgggctgatcacgaggtcaggagatcgagaccatcctggctaacacggtgaaaccccgtctctactaaaaatacaaaaaattagccaggcgtggtggtgggtgcctgtagtcccaggtactcaggaggctgaggcaagagaatggcgtgaacccgggaggcggagcttgcagtgagccgagctcgcaccactgcactccagcctgggtgacagtgtgagactgtctcaaaaaaaaaaaaaaaaaaagaaaattgttttatttacagtagcattaaaaataataaaatactttggattcaatttaacaaaagaaccttaaaacttgtacacagaaaatcataaaagtattgaaaaaaatcaaagatcatctaaataagttgaaagacaatgttcatggatcagaatacttaatattgttaagatggcaatactctcaaactgctctacagattcaatatgatttccatcaaaatctcagctagctttttagtagaaattgacagcagatcttacaatgtatatagaaatgcaagggatagccaaaaacctaaaatagccaaaaacaatctcagaaaagaaaaaagttggaggactcacacttttccatagcaaaacttattgtaaagcttcaataatcaaggcaatgtggtatggcataaggatagacttatagatcaatgaaatagacttgagaatccacaaataagcccttacatttatggttaattgatattttcaaaaagaatgtcaagacaatcaatgggagaactaatagtcttccacagatggtgcctaggcaagtgaatatccacatgcaaagaatgaatttggacccctacttcacatcatactcaaaaactaatttaaaatggatcattaatgtaaatgtcagagttgagactgtaaaactcttagaagaaaacctaggagtagatatgacaccaaattccaaagtgataaaagaacaaataaagatgctatcaagaaagtaaaaataatgagagaaaatatttgcaaaagatatatctgataaggaacttacatctagaatatactttttaaaataactcttatagcctgggcaacatagcaagatcccgtcactacaaaaaaaattagccaggtgtggtgtcacttgcctagagtcctagttacttgggaggcagaggtgggaggattgcttaagcccaggagatcaaggctgcagtgagccgtgatcatgccactgcactccagcctgggtaacagagtgagatcctgtcccaaaaaaatatctctaatgctatggactaggtgtttgtgttctcccaaaagttttgtattgaagccttaccaccaatatggtggtatttggagataggacctttggggtgattaggccatgagggtggagccctcacgagtgggattagtgcccttataagaatagacatgaggcggggtgaggtggctcatgcctgtaatcccagccctttgggatgccaaggtgggcggatcacttgaggtcaagagttagaaaccagcctggccaacatggtaaagcctcatctctactaaaagtacaaaaatcagctgggcattgtggtgggtgcctataattccaactacttgggaggctgaggcaggagaattgcttgaacccgggaggcagaggctgcagtgagccaagtgtgccactgccctccagcctggatgacagagcaagacttcgtctcaaaaaaacaaacaatcaaacaaacaaaaactcttcggacttaaaaagaaaaaaagaagaagagacataagggaattttcttcctctctctctgtgctactccacttgtgaatagaagaaaatggccatctgttaaccaagccttatacatcaccagaaactttatctactgccagcttgactgcagacttccagcctccagaactatgagaaataaatgtttgttgttgaaactgcccagtctatggtgtatttattatagcagcctgaaccaactaagacatcttacaactctgtaaaacaacccaatttaaaatcttactcaaggttacgcaggaactcaagaattctcacccaggtgatccactttctttgaataacagttgtctttccttctctttctggagctctgatactgtagttttgtgctcttgtattatagaggcagttgctttattaaatagtttttaatatctgtttcttttttatcttgaataccttttaatatttgcagcgcttattctattttgatcacccatctttgaagcagataagttattcacaggttggctattttaaggaggttctcttggggattggctggtcatagactcattgaaatgtaaagttcatgccatgactcgagcttggtatgtgggtttggatgtgacttgcttgagatttcttctttggtctatcacctctgctcttctaagccaaactgggcccacacttggaccctgctacccaggtctcttcccatccttgctcttacaagcaagggactgaagttttgcacctcactgtgcccttcacctttgataagtgttcttagggcttctgctgaagttggccccgtggcatagtgcttgtgcccccactacagatgcccaaccccttgctctgtccctattgctagtggtgcttctccccacagttttgtgatgcaggatttgagagttcctacttttgctgaaaatagagtttcttatttacctttttgattttgaacgagtccagcaaatgactaaggagatgacagctggcactgccgtcttcaggacaggagtcacgaggcatcttctggattatcataccccagtgtctgctacagcccctctcctaggttcctcgtagacacatttgtgattcctaaatttggattttctttcatcatttttatctctagaagaatgcatctgtttatttttccacaccactgattccaattcaagtcttgtccatctgttgtttgggcctcctgttgaggttcggtttctggagtcatctttgtaatatccccttttcattatttagttggattctttttccagtctcctctcattttatgaatacctttacctctaacactgacctttttggggatcttatttttttctttaattttaattttttcccatttttattaatttttatacaaaggcaatagttgtacataggatcttatttttttagattatgttttctttggtataccakgtttactcattcttcggtgactaatttctctgcttttcaggtaggtctctgtagttcaagagtttggtttaaatgtctaaccattcttagtgtctgtgtatttttgcaaatgaggttcaggttgatcaataatggtcttattggccttttttaaaggctgctatttgatttcccaggcaggcttcccttctgaaaatgacagccacctggccacagggctgtgggagtgagctgcgtcctgaccatagtgagtgggtggggacgctgacagacacgtttcctttttgtgagttttcacaagtacgcacaagtaaggacaggcaagctgctggaactcttttggttgatgaagaagaaagaaaggaattgcttaagagcttgctttgagagatcttactgctgaactaagctactcttctgttttgctttttctcagatgctaagtaaaagacagtaaagaagaaaataattatatgttttgtgcccaactcctaaaacaagccagttagtagcaggttgcttctttggcttctggtgtttggcatacactgtctgcaaatgtgctgggaagatggggttgtagtgaagcggggcctccttcaccttggggtgtgtccttcttgatgtgcccttgcccaggtggaagactttaatagacataaagcagtaatgggcgagtgttctacatcacctgcttttgtgctcagatggcaatcccctccacatttccactggtgtctctgtgaggaagctcatcgcaggttttgtattctcgggcccaccttcccccacttctgagagcactagaaggcacaattttctctcctgatgaatttgggaattcaagtaggcagctagcagaatagacgccaagtgaacctccatttaatgactcttcttccagttttcaacctcatctggtcgtgcagagcttctgctaccactacattgcagtagttaggaggaccactgtggatttggctttttttctccccactcttggggaagaaccctttttcccaagctcaagatgttaaagctgtacagtcgttttccagagaataccattgaatcgttcaagggccagtcaggagacagaaactgtaccagtaatttgaacagggaaatttaatagaaataatgattaaccagcaacagaggattaactactaagacgggagggagatgctaaagaatataggaccaggagatatggtgagcagctgccacaccagggctgagggaaggaatatccaaagaagcagcaaagttgaaagaggccttctctcgcaaggctgaggtgcagacccattggcattggatggtgaagttcactaaggtgccataggaaccggctggcagggaggaaactgcccaccagtgggaccggaatgccagtgaaactcataggatggtgtgagcygctggctctcctgcacacagctagcaagaaagccaaaagcccagaaatggggagagaaggcccttcttgttgtatctccccagagccctctactggcaaagccagcttgtgtaaaaggaatgtctacagggtgctactccagtgtcacaaagcagggtaaagaagggtgggtttggaatggaaaggcaataaataagtaattgagtcaccagtattaacaggttcaaattgggggatttcatgttgtactgtttccttgagtagtttaagagaaacgattgtagaagagctagggtatgaatgaatccattgatacataagctcagtttttgcccacatctcatggtagagatgatttatctgccagttggtctcttcagtctagaaagatgaagtgcctggggattcatttgtccctctatgatacagaacccttcccttagaagcagaagtagcagtctggatgtgttggctcatacttctaattgcagcactttgggaggctgaggcggatggattacctgaggttaggagtttgaggccagcccagccaacatagtgaagccctatctctgctaaaaatccaaaacctattatctgggtgtggtgatgtatgcctgtaatcccaactacttaggaggctgaggcaggagaatcacttgaacccgggaggcagaagttgcagtgagccgagatggcaccactacactccagcctgggcaatagagcgagactccatctcaaaaaagaaaaaaaaaaagcagaagtagcagttaacatctttttgctgagatttaacgctactcctgatggttcttttttttctctctcttttttgagatggaatctcactccattgcccaggctggagtgcagtggtggcatctcagctcattgcaacctctgcctcctgggttcaagcaattctcctgtctcagccttctgagtagctgggactacaggcacctgccaccacacccggctaatttttgtatttttagtagagacagggtttcaccttgttggtaaggctggtctcaaactcctgagctcaggtgatccacccgcctcggtctcccaaagtgctgggatgaaagacrtgagccactgcacccggcctccttatggttcttagtgcaatttggagtagaagtttggtgtacagtattttaggaatatgtgagaacccaagatttgaaaatgtgccaaaatgagagtgaaatgcctatcaaaaatgttggtgacctttcaaagaatgtagctacagtttccttttgagcgctcaagattattttcattgtacagtataatattataaaaggaaatttgggattgatctaattaggcaataaaaatcttaagtaatgaaacttacagtacagatatgaattatataataggaggggccatctagatagatagaggagttataatttggcaaatgaactgtaaatgagcacatgaaacaagttaaaggacaaaagctgtttcaagaagaattttcccacagagcttaagacaaagaataaagaagtactttgttagccaggcctttgtcgcccattttcatctagacacaacctttaatagttttgtaaatgtaagtttttaacaatattgtttatacctaagcctggaaaaggaccttaacaccatgaccaactagaaaactggaaacactgaacaaaaagttttgctttttaacttgtattttttatactatgttcttaatactgtttctcctccagcctagtattgaaacagttctgatttgagtcaatgttgagttcagcaggaagcacagtgtgatggcggggttttcttccattctgagcatctggatgatgccagtgctctaactggctgtgaggcccttccgacctagtgcagggagaatcttgtttcatctgatcatttggtactttgggaacatgcagtgattattgtagtccacctgatagtgaatttctgtatttttaggaccagaaggtatgttttaagtcgagaagatttgaaaggataaaagtggacatgtgggccaggtgctttggctcacgcctgtaatcccagcactttgggaggccgaggcaggctgatcacgaggtcaggagattgagaccatcctggctaacacggtgaaaccccatctctactaaaaatacaaaaaaatagctgggcgtgatggcgggcacctgtagtcccagctactcaggaggctgaggcaggagaatggcatgaatccaggaggcggagcttgtagtgagccgagatcgmgccactgcactccagcctgggtgacagtgcgagactccatctcaaaaaaaaaaaaaaaaagacatgtgactgatacaagtgacactgaaaatagaactgattatgacactttatgacctactgtccaggtcgtaaggcatctatacaaattatggagagtgaacctgtggaaaattactttggcaagaattcttgaaaaaagtttggtttctttaaagtacattatggaaaatattttgatttttaaaatatgttttacatgttggcaggaaaaagaaattattggatgctgtgttgagtaacatgcacccatcatggaatcaaagggctctccctctcatctgtggtcttactttttgtagaccttattaagaagctgttttgcacgcttgaggacctgtcccgaatgaaccctactccctactcaggaggggcatgagccctcrctgtgtgtgatgttttctggtgatgctcacactgttctgtgtgggcagacagcgagcagcagtattggacttggagaggccgtgtgccaggcatggtgctcagcggctttcctgtgctaccttattacactcccataaaacccattcagggtaagagttgtgttgttcttcarttgaggaagccgagcctaagcatacccaccaagtggaaaccaggattcctactccaaagcctctgcccttaggacggtgtgaggaaacctgttccttgtgatcaactcaggagccacaaagggcctggagaatatctgctcctcttctacttagagcagaggatgactgacccttggcttaatggctgttggtactgttttagagatgattatacaatataccaaaaagttcaaagagctaaaaatatatctctataccttattttatatttatcattttgaccatcaattcttccttacatttagctattcaaattaaatctgttttttctattttggtcttctttaggtttgaaaaataacaggtcagcctcttcccagatttcttgacatccttggaaaccatgcatttatgccattgcagagaagctcaagaatggcccagatccctgtggtcacctggctggtttgcagagcctttctttgtggcctgcattgtacctcacacactgcctgctacttctggtcatgttgaattgcccaccttttaataacttatgtcaggttggacttcagtatttatggtcataacagaaatgtttcttccagttatgaagtgatttgttttttcattaatagacatctgagtgcctactatgtggggggaaaaaagggctctcctgacagttgtttttttgttgttgttgtttgtttgtttgtttgttttccaataatttcagttgaagtatcaggaactacctgggattctgtcctcagggataattctttctgttgaaagtctccaagagtgtggtgatctaattattgatcaaagttcataatatggtttctgccctcctgaaacatatggcctacaaattatctatttttatgtttagtactttaaaaatgatatattaaaaaattaaactagagtgatgatacaactatctgatctttgacaaacctgagaaaaacaagcaatggggaaaggattccctgtttaataaatggtgctgggaaaactggctagccatatgtagaaagctgaaactggatcccttccttacaccttatacaaaaattaattcaagatggattaaagacttaaacgttagacctaaaaccataaaaaccctagaagaaaacctaggcattaccattcaggacataggcatgggcaaggacttcatttctaaaacaccaaaagcaatagcaacaaaagccaaaattgacaaatgggatctaattaaactaaagagcttctgcacagcaaaagaaactaccatcagagtgaacaggcaacctacaaaatgggagaaaattttcacaacctactcatctgacaaagggctaatatccagaatctacaatgaactcaaacaaatttacaagaaaaatcaaacaaccccatcaaaaagtgggtgaaggacatgaacagacacttctcaaaagaagacatttatgcagccaacaaacacatgaaaaaatgctcatcatcactggccatcagagaaatgcaaatcaaaaccacaatgagataccatctcacaccagttagaatggcgatcattaaaaagtcagggagcaacaggtgctggagaggatgtggagaaataggaacgcttttacactgttggtgggactgtaaactagttcaaccattgtggaagtcagtgtggcgattcctcagggatctagaactagaaataccatttgacccagccatcccattactgggtatatacccaaaggactataaatcatgctgctataaagacacatgcacacgtgtgtttcttgcggcactattcacaatggcaaagacttggaaccaacccaaatgtccaacaatgatagactggattaagaaaatgtggcacatatacagcatggaatactatgcagccataaaaaatgatgagttcatgtcctttgtagggacatgggtgaaattggaaatcatcattctcagtaaactatctcaaggacaaaaaaccaaacaccgcatgttctcactcatagatgggaattgaacagtgagaacacgtggacacaggaaggggaacatcacactctggggactgttgtgcggcgaggggagggaggagggatagcattaggagatatacctagtgctaaatgacgagttgatgggtgctgcacaccagcatggcacatgtatacatatgtaactaacctgcacattgtgcacatgtaccctaaaacttaaagtataataataataaaaataaataaataaactagattgatgtgtgttttggtgtagtccccttagaaaatttgttctcatgaagtataaagttttgttctctgaataacttaacttgcatacagtgatctatgttaagtgatcaaacttcatagtgtagacactgtaccaaacttgtctttttttgggtaatttctgtgatatgtattctgttctgcgtgaccattttaaaagagaccttggtaagctgaactgtgtccagaagagattgatcaggtgaggatttagggaggtagaggttggagagacatttagacgaaaggctaggaattattttcaagcagaactgtccagcggtagaatcagctgcttcattgagttgtaggttcttggtgtatcaagcagaggcgaagttcacagctcagagacttttgtagagaggattattataaaatgtgaaagatcaattttcatgaactccaaaggttttttaaaccttttttcctttttttttttttttttgagacagtctcgctctgtcgcccaggctggagtgcagtggcgtgatcttggctcactgcaacctccacctcccaggttcacaccattctcctacctcagcctcccaagtagctgggactacaggcgcctgccaccatgcccggctaattttttttgcatttttagtagagatggggtttcaccatgttagccaggatggtctcgatctcctgacctcgtgatccgcccgcctcggcctcccaaagtgctgggattacaggcgtgagccaccatgcctggcccttttttccttttaattacattcttattgaaatataacttacataagaaagtgcatgtgtcttatgtgtgcagcttgataatttttcatatgtatacacttatgtatccccacccagagaatggagtagaacaggctccctgtgcctgtctcagttatgacccccaaaagtagccastgttttgatctttagcattataaattagttttgccagatcttcaggttcatttaagtatgtatatatttatcaggtacatgaatacaatatgtactatgtgaaaattatcagtgttgttggtatagctgtggtttgcttgtttgttcgttgctgggtagtattccattgtaaaaacaaatcactgtttatccattctgctgtttaattgacattttggtagtttccagttttgagctcctatgagtaaagcttctgtgaacattctttttttttttttttgagacagagtcttgctttgtctcccaggctggagtgcagtggtgcaatcttggctcactgcaacctctgcctcccaggttcaggcaactctcctgcctcagcctcccaagtagctgggattacaggctgtgccaccacgcccggctaatttttgtatttttaatagagatggggtttcaccatgttgatcaggctggtcttgaactcctgacctcaggtgatctgcctgcctcggcttcccaaagtgctaggattacaggcgtgagccaccgcatccaaccagacattcttgaatttgtctttaggtctctataaacagatatttctgttgggtttataccccggactggaattgctaggttatagggtatacttctgtatacctttagtagatactgtcagttttccaaagagataatacaaatttacagtgtttgagactccagatgttctacttttcttgccaacattaggattatccatttttatattctcagctattctggtgagggtctagtggtatcttattgtggttttagtgtgcatttccttgatgtaatattgtccaacttttcttgttgtttattggacatttgaatatcctcttttgtgaagtgcctatttaagtctttcggcccatttgtcattaattgggttgtctggtttttccttatgatttgtagatctttatatatgttgactacaagacctttgttgggtttgtttgtttgtttttgagacggagtctagctctctcgcacaggctggagtgcagtggcatgatcccagcttactgcaacctccactcccaggttcaagcaattctcctgtctcagcctcccaagtagctggaactacaggcacacgccgccacacccggctaatttttgtgtttttagtagagagtagtgaaagttttgtatttttagtcaggctgatctcaaactcctgacctcacatgatccatctgcctcggcctcccaaagtgctgggattacaggcatgagccaccacacccagcctctttgttgggtttttgtattgcaactatcttctattttgtggcttgcctttttcctatcttaacagtgtcttttgatatacagaaggttgtaatattcaggtagtcgatatcagtcttttgggggtgggggagctagtgttttttgtgtcctgtttgagaaatatttgcctaccccaagctttattgttgtgcctttccgtgattcatattgaattaattttgtgcatggtgtgaggttggagtcagtgcttattttcacctgtatggatatgcagtttccctggcaccattcatgaaaagatcatcctccctgtactgaaggttaaacacacatacatatgtttgtttgtgtgtatatatacaaatacccatataactgtgaatttttgtgcccgtatttacaaaccctgtcctgggtgttggacattgctggttaacaggtgccttgtgaatgtgcttgcacctgcgtggttagtgtctatcgccttcattagtgtagtcaggcagggctcctggagcacactctggctgcactactctaggcagtgcaggggctcaggtaggacggggaaccctgacctccccattgactcacaggggcagccaggtagttgaaaaagggkacagctragagaatttcatattctctgtgccacctgaagtgcacactcaagctcccacaacagccgtcagaatcaggagcagtggtsgacagtccgggaatctggccgtgtgtggtgcctctcctgtgagccagagctggagctactaggatggagaaggtgcagtccttgccctttaaacttgccatctggtaggaggaacacacccaaacaaataaacgggtcacagtcagcagcaatgccaaagggcagttctagagtcgagtaccaactggtgtgtaattaggtagaattgactggatgaagagagaccacaaatgagctgactttttatcagattctcaaagcattcactggagactgatagaagggaagtgagagagaattcttctctaagggaatagcctgggcatgtcattatccctgcactcaggtgaagccaggtagtgtgaggctgtatcagggtgagggacttggttgtatgtagcctccccaccccaagtactgactcagggagagtcatgaggaggactgtcctggtgatcctggatggaagtgtggacagacagtatggctttgaaagaacttcatagggttgtttgggcccacagtgagttagtgcagcatactccacggttcataatttctgactagttaacagtctcagaaaccctggtctggctgcattctccccatcctgatggaccacatgtggagcgctggcatgcctcctcccagatgcccacaggcatcagagtaagttcttactggagaaggccctaagagattatgtcagagcaagttcaacacagatttgcccttttgttctttagaaattgtatgtacaatgtcaggtcacttcgtagctcacctttccattttaaagaggcrttccttgtactttcattccgtatgctgctttgttacaatggatttgcaaggttttatttcttacacagtgagaatctggtgactaaacctcaagggccataatgtcctttggaacaatgagatttgcctccccyagtttgcacatattgtttattaattgtgaagatgatatatgcctattggttaaaaattgagatgttatagaagtgaagaagtaagaatgctcttgccccacctccacctctgcttagttctttaatgatggttacttttaaagatttagtgaacagctttccaaacttatttttattacatataaatgtatccatggggcatatgtgtttttaataaaatggaatcgttttatacattgtatagaaatggaggcctttttttctttttccttttaatttttatcttttgtagagacagggtctctgttgtgccgtctgatcttgaactccaggcctcaagcaatcctcctccctcaggttgctgagttcacaggcgtgagctaccatgcccagagtcccttttatttttttcttaattaaactatgtgttgtagacttttttcaatgataacacaatagagagttctgtgttctttttaagggttgcatagttgtccattatggatatgtcattatttattttaccaattctttttttttttgagacggagtttcgctcttgtcgcccaggctggagtgcaatggcgcaatcttggctcacggcttactgcaacatccgcctcccgggttcaagctattctcccgcctcagcctcctgagtatctgggattacaggcgtgcaccaccatacccggccaatttttgtatttttagtagagacaaggttttgccatgttggctaggctggtctcgaactcctgagctcaggtgatccacccacctcagcctcccaaagtgctaggattacaggcatgaaccaccgtgcccggcctattttaccaattctttactgaatttgtccttaacatgtttaggtctgtacagttgtatgaaagtatctgtaggaaaaagttctagaagtagaattactgggcaaaggtaaatgcacactttaaattttcaaaggtgttttcaaattatcaggtcatatgaacttacattcttcccagcactctgtgaaagtggctgtttctcacagacacaccaatattggcatcatcattctaaccctctttgatgggtgaaaaatatcttactgttttattattaaagaaatttagtatctttttaaatgcatagtagccatttgtacatcttcatctaataagagcaaaataaaacattgtaactttttccattgtgattctagataactttgttaaatgtgtttctgttcagatgtttttcacttttatttaagtcaagtctgtccatctttcctttttgctatgcttaggaagactttacctttcccaagattatagagattcttctctgtttgattctggtctttaggtccactggaatttatttttgtgagtaatgtacaataaaactctatttccatttttcttcttctgttttttgaaacagggtcttactctgtcacccaaggtggaatgcagtggcacaatctcaactcactgcaacctctgcctcctgggctcaggtgatcctcccacctcagcctcctgagttagctgggactacaggtgcacgccactacacccagctaatttttatatatatatatatatatatatatatatatatatatatatatatatatattttttttttttttttttttttttttttgtagagacagtgttttgccatgttgcccaggcttatcctgaactcctgtactcaagaaattctcctgcctcagccccacaaagtgctgggattacaggcgtgatcccacccatgctcagcccattcttttccttaatgggagagtccgttgccccacctcctttatgaacagttcttctcattgatgtgaaatgctaccaaataatattttttttctctttgtaatttccgattgaccaaataattatttactgggatcttatataaataaagactcttaagactttagctttttagtaaatattaaaattactttttttttgagacaaagtctcactctgtcacccaggctggagtgcagtggcacgatcatggctcactgcagcctccttcttgcaagttcaagcaatcctcacacctcagccacctgagtagctgggaatacaggtgggcaccgctgtgctcggctaattttttaatttgggtagaggtgaggtgtcactgtattgcctaggttggtctcaaactcctgggctcaagcaatccacccacctcagcctcaaattgctggtattataggcgtgagccaccgcacctggtgtaaatatcgaaattatttgataaaatatttaccaaaactagaaatggtttctatagcytaaagttacaaagaaataggactgaaaacacactaaatgtaaaatggaaggaattttttagctttatttattttgttgccagtttctgagcacaaatgcttcagacttttttttttatatatagtttataaatcttagttatacactggaagacaaagtgattttatgtgtgggaaagtagttttatgcacagttttcataaacccttgctgtttagtctttcaatccttgttatttttcccatctctctctgcacagcctaaatgcgatggccaggtattactgacacaagtgtggaagcgtttaaacctggtagaatgtgactacttcgggatggagtttcaaaatactcagtcctactgggtaagtgcttatgacgtgcccaggcgtggagcctttgggcctgctgtgatgacagcygcaagatctttcatcattgccacatcatcagcattaaatgtttttgctattaaaatatattcttgttagctgtagagaatatgtctgcctttaatccaagcctgaattcacactctccctaaatgtgttctgtttgttagcacatgtgctgaggaaactctcttaaaaggtataaaagcaacctctaatacatcctgtatgaaaatcatttcgaaagtggacttgtagcaaacttaaccagttatgcctcattttacttaatagatgcaaccttaaaaagtgtggagttttaatatttatagatagaactgttttaaagaaccatacatcaaccctttagttcaaaaagcatgtcagcgttattaagttctgtccagcctttcagatacccttggcagtgcgaccagatttatccaagtctcctgttctggtgacatgacgtacctcttttttgcagaagcccgctcatcagtttgttcacaaatgcagtagtaccaaatatttgtttggtgttaacaaattcccacaaataattattgggacccattctgcgcatagcagcaactgaatagaggtatcccagtatcatatagcaattttaacgtcttcccatgcttcccaaagcaggcattgctgtccttcttgtacagtttgttttatcaggattcaacctttaagagsgggggtagagtcaaaattttcctgacataaaaatttatcttaytataaccatttttgtttttatagcatacttgttaaatagagacattatttaatagattggatttcttctgttaactcttctttagatttggcttgaacctatgaaacccatcattaggcaaatacgaagtaagtccttggtttgactctttaaaatctgtttgtttaagatgtgttgtcctggaatgtttaaaaggcatgttcarctgttcattctcaccaccgtgtatggttagcaagaagtaatcaccaatagcggacaaacttggaagtcattttgctgtttagttttagtaattttaactcagaagattctaggtgacttgcttcacattcggaaataagagcatatgctgtttgatatcgtcttaatttttggccaatatgcaaaaataactgcagtttctcccttgattatgaaaagacattgagattcttcttttaagtagcttttaataaaatagttgatactgttttacagttataaacataattgtaattgtgaatataataataacaattatattattatttttgagacagggtctcgctatttgttgcccaggctggagtgtagtggtgtgaacacagttctctgcagcctcaacctcctgggttcaagctgtcttcccacctcagtctcaagataattattttcgttcatctacttattaaattttttaaactaaggcatgtagtagcacttctcagttcttctgtaattgtgtcagatgaagtctatagttgtctgagtcacccataattttttgtattactattataaattgaagaaaaacgtgtagaaataacttcattatatcagaacaaggatctctgaggaaagaaaaaataactattttataccaataaactaagataatgtacctttacagtaatcagatttcaaaaataatgtgtttttattactattaataatactggcccggtgtgggggctcatgcctgtaatcttagcaatttgggaggcccaagcgggcagatcacctgaggtcaggagttcgagaccagcctcgccaacatggtgaaaccctgtctctactaaaaatacaaaaattagctaggcgtgatggcgcatgcctataatctcagctactcaggaggctgaggcaggagaatcacttgagcctggaaggcggaggttgcagtgagccaagatgacaccactgcactccagcctgggcaacagattgagactgcatctgagaaaaaaaaagtagatgtaaacacattaacttttttttaaaaaaaactttttcatttatcatttttttccctaaaacataaactgggggccgggcacggtggctcacgcctgtaatcccagcactttgggaggccaaggtgggcagatcacaaggtcaggagatcgagaccatcctggctaacatggtgaaactccgcctctactaaaaatataaattagccgggtgtaggggcatggtggggggcgcctgtagtcccagctactcaggaggctggggcaggagaatggcatgaacctggaaggcggagcttgcagtgagccgagatcacgtcactgcactccagcctgggcgacagagagagactctgtctcaaaaaaaccaaaacaaaacaaaaacataaactggggaaaaaatgtctctctctctctctttatatatatatatatgtatgtgtgggtatatatatgtctgtgtgtatatatatakagagagagagagagagcacgcgcatgtttttgtgtgtggaggggtgggcaatctcgttctgtcacccagcctggagtgcagtggtgtgatctcagctcagtgcagcctctgcctcctgggctccaccagtcctcccaccttggcctcccaagtagctggaacttcaggcatgcgccaccatatctggctaatttggggtttttttgggggggagaggggcgggtagagatgggatttcaccatgttgcgcaggctggtctgaaactcctgggttcaagtgatccaccagcctccgcctcccaaagtgctgggattacagatgtgagccactgcacccagcctatttaaattttttaatgtgcaatttcctacttgtttttatttatttatttatttattttttgagacggagtctcgctctgtcgcccagactggagtgcagtggcacgatcgcggctcactgcaatccccgcctcccgggttcacgccattgtcctgcctcagcctctggagtagctgggactacagtcacccgccaccacgcccggctaatttttttgtatttttaatagagacggggtttcactgtgttagccaggatggtctcgatctcctgaccttgtgatccgcccccctcagcctcccaaagtgctgggattacaggcgtgagccaccgcgcccagccctacttgtttttaaggcttccttgagtaatccctgctgaatgcaaaagattttaaaattctatatatatatgtgattggtacttgggactcataaattcatatacaggaaatgcttctttgttttttcttttgttcggagacagggtctcaccctgctgcccaggctggagtgcagtggtgcagttgtagcacactgcaacctcagactgctggcctcaagccatcctttcacctcagcctcccaaaggggtgggattacaggcacacaccaccacacctgggcagaaatttcttaatatcatattatttgaaaagatttgctgtaacagtccacttggaagcatgacctcagttatacagtaatatatgaaaagagaataaatgcaaagatcggccttatttgtgaagtttaaatttttttgttatagggccaaagaatgtggtgcttcgcctagctgtaaaattttttccacctgatcctggtcagctacaagaagaatatacaaggtaaagagctcacagagctgaagctgttgtcagcaggaatcttgtattcacctgttatctcccacagcacctggctcattgaaagaatgaataagcctgatatacacagaaaagtgaccatgagtgtagagtggttaacagaagcatgttggcagttgacccttgcacaaacacatgtgaataagacttcagtgtaaggtttacagtacaaatttgaaaataaaaaatggaatgggatgttagggtcatgttgaacttacattttccaaatgaacatagatttatgcatgttcataaggttctcagggattttgctcatatatacttatttatcaataaaatatacttaattggtagaagtacccagtgtgttagttcttatggatttatggagcagaaatactttgggtcacttcttttgtgctactattttgaattaaagatcaattctttataggaatgatctaaagatggcagggtgcaatggctcacgcctgtaatcccagcattttgggaggccaaggcgggcagatcacgaggtcaggagatcgagaccatcctggctaacacagttttgaaaccccgtctccactaaaaatacaaaaaataagccgggcatggtggcgggcacctgtagtcccagctactcaggaggctgaggcaggagagtggcatgaacccgagaggcggagtttgcagtgagtcaagatcacatcactgcactctagcctgggtgacagagcgagactccgtctcaaaaaaaaaaaagaaaagaaaattatccaggcgtggtggcaggcatctttaatcccagctaattgggaggctgaggcaggagaatctgttgaatccaggaggcagaggttgcagtgagccgagattggcatttcagtccagcctgggcaacaagagcgaaactctgtctcaaaaaaaaaaaaaaagaaaatattaacaattgtttcatctggacagtaaggttatggaaggtttttctttgtattttttgtatttgttcacatatcaattatattatgaagaatagaggaataacctaaaaagcaactgaaaacccaaaattagatataaaagagaactatgatgttgtagtggtatcaataacttttttgccttctggctaaaagtgtactcataaatgaatcagatgtcttatgaactctcttttaaaggtttctgcatatcattttagcaacacaaaatcgtagaatgtcagctgcaaggaaatggagagaccacattagttcaccctcttatttttaaaggtttaggaaactccaaagatggcaaaaagtatttttatgagtgaccatagatcttaatagtgtattaaatgcctgacatttaccaaaaaaaaagtctcttttgagggaatcacttttaaatagagatagatagatagatagatwgatagatagatagatagatagatagatagatagatacctgaaaatgatggataacaaagtgtcccctcattcaggatcctgggtctcaagttctaggactcatgctgataactcagtattatagttactcccttctcccccatatttatgtggaggattcttttttctgtttataaaaatgtacatgtttgtggtaaaagaattttttttccaaataaagctaagggccaggtgcaacggctcacacctgtaattccagcacttcaggacgccaaggtggggggatcagttgagctcaggagttcaagaccagcctaggcaacatggggagacctcatctctacaaaatatcaaaaaattagccaggcatggtggcatgcacctgtagtccagctactctggaggctgaggcaggagtatcacttgagcccaggaggttgaggctgcagtgagctgtggtagcgccactgcactccagcctgggcaatagagtgagagcctgtctcaaaaaaaataagtaaacaaagataagtaaaaagtaaaagttctccatttactcagcaccttattctccgcataagtacgtatctttcagatgaaagcatagatgtgcaataaacacatagatatcagaactttaaagaaattacaaatgttataaaacaatatcaaatgatacgtattgaactgtaggttgatttttccccccacttattaagcatgctgtggacatttttccatatcgtatataaaaatatactaaattaggctgtaacataatttcatcattctcatattcatccatatttccaatatttctctgttataatgctgcagagaaacattgttcacatacctttgtgaactatgggaatattagtctaggaaagtttgtagaaatggaattgctgtgttaaagggtatgtacatcctgaattttaagagaatgtggtaaattttaatattgtgcactggggcatgaattccactagggacagggggttggtcttgcttacctttgcatttccagctcccagaacagtacctagaacgtaattcacgctcagtaattatttgctgatggaataaatgaacatataaatattttcaattgccttctctcattacattctcactaatggtattccaaagtgcctgtttctcagatcctagccaagaccagatattatmaatccgttaaaaaatttcacagccatgctttaagctgtgttttcattggatatttctcctatttcatccaaaactgtgagtgcagttttatgtgactaacagaagtaatgtgaatttgtgaccttcctccttgaaggtatggctgcagatgtgtrattatatgtgggtagatggtatgcctgaaaaggctaatttctttctttttttttttttttcgagacagagtttcgctcttgttgcctaacatggagtgcagtggcatgatctcagctcactgcaacctctgcatccgggttcaggcgattctcctgcctcagcctcccaagtagctgggattacaggtgtgcacaccacgcccaggtggtttttgcactttttttagagacagggtttcacagtgttggtcaggctggtctcgaactcctgacctcaggtgatccacccgccccagcctcccaaagtgctgggattacaggcgggagccatcgcccctggccaatttcttttttttattgttcacatcagagtgccttagtgtgttcagcacttcctttgcgctctcccatgtgtgtgactcagtctgctgagttggtttatcatctgaccttcacttggtgactgtttgtttcatgaaaggccttttgtgactttgctgtttcgtgaccgccttgcgttttgctcactgttgggtcactgccacttcccagggctcatttgctgtcttgctgtggagacatgtctatgttacattcagagaacatttggaattgatctctgtcttattttgaactctcttctagatacttgtttgccttgcarcttaagagagacctgctggaagagcgtttgacctgtgctgacaccacagcggcccttctcacgtcccatctcctgcagtgtgagtatctccccgccagcggggagcattcactgaccatggcacagatatacccgcackcagaactacaattagttgctgatgkatttgcctagttagtgagcctgaccatagaatgaggtgtttcaacttcagtgttttttataagctacagattaacttctgtaaagtggaactccttgaggcaaatagtttccacgtagcaaacacaggccaaggccaaaatctgtagccacgttccttcttttgggttgtctctcatttatgcctttgtgcattttaccagcaatgcatattcagtctaagagtcagaatataaaccaaactctgagcaaaccctggaaagggcctcactgggataaaagttacagtcctctcagattagtaaagcrttagccrtgaaggaaaaagaagacatttcttcagtatctcacacagatcaagagatggttcagaactgtgtcaagaattatagttacttcaaaaataaaccatgagaagtgtaagaggaggttctggcrccttgccgagcccccagcgatgggaatagaaaaacagaaatacccacattgctcctggactagaggtgggaccacagctagcacagaactaatgtttctgaaatttgaatccaggaaatatgacatagaaagttccaaaattttaggaattaataagtatataggttatttgcagcttccttggtccttccccagacataccttcttcaaataataaattttattatgggtttgctatcctccaccaggggacgtgttgattaataaaagttttcaaagtgactttggttcttactcatttggctgaaagacttctcaggtagacacatggcaacgaatgcaatgtatgactgaaccagatctttttgctataaaaaacataattgggcagttggtaaaatatgactagggtccacatctgggatggagcctcagatcgtggccctgttcctgatctgggtagttttacaaggctgcgggtaagaatattgtattagtccatttccacactgctgatagagatgtggcggcagcgagagaggcttgtacagggaaatggccccttgtaaaatcatcagatctcatgaaagtctcactattacaagaacagcacggaaaagatccgcccccatgagtcagttacctcccactgggtccctcccacagtaagtgggacttgtgggagttataattcaagatgagatttgggtgggaacacagccaaaccgtatcaaatgtcatagtttataggaagtccatactgaagtatggcaagtaacatgttagcaactcactctcaaatggctcaaaggagaaaaaactcttgtactgtgcttgtaacttctctgtgaatatgagattgtctaaaaataaaagcatattgctttaaattattgaactttatgttattaagacattgtggccttaaaatacatgaaattagacagagacattattcatcaagaaatttgagaaggtctgaaggaaaaaaatcatttaaaatacattatcctaaaataaataaaatacttcagcctgatcatgataatcttgagacaatttaggtttaaggtgtagtttaaaaataatagtagtccaggtgcagtagctcatgcctatattcccagcacatttgggaggccaaggcaggaggattgcttaagtccaggagtttgagaccagcctgggcaatgtggcaaaaccttatctctacaaaaaatacaaaaattagctgggcatgatggtgcttacctatagtcccagctacttaggaggctgaggcgggcagattgcttgagtccagaaggttgaggctgcagtgagtagtgattgcaccattgcactccagcctggtcaacagaacgagaccttgtgtcaaaataataataaacacattaaactcatcaatgtttgcctccctggagttactaatcaggcctttgttcttcaagaaatcctcttcacttcccattatatttgccttttaacagcataaaatatttggaaaaattaaatwaaaaatcttgcttttttagggatatattcttttgctacaaatttgggataatttttttttacttttaatgtatgcaatgacacatacaaatgcttgtagtttatttaaaaattagttacttacttttaacctatctcagcggaaataggagattacgatgaaacgctggaccgagagcacctcaamgtgaacgagtatttgcctggccagcagcactgccttgagaagatactagaattccatcagaagcacgtgtaagtcatcacaattgtctgtcaacacattgtcaccacagtaatgactaaagagtgtgtaacgagaaaggactgttgtcgtgacttctgcaagattctaacataaggaccattgctcctggcctcaggatgtgcagctgctgccagaggcagcttggcagacacacagacacacaggtgccctggcctgaagcaccttcacacctgcacgatgtgctgctttagaaggtgctggaagaagccaggcacggtggctcatgcctgttatcccagcaccctgggaggctgaggcaggtggattgcctgaggtcaggagtttgagaccagcctggccaacatagtgagaccccatctctactaaaaatacaaaaaattagctgggctaatggcaggcacctgtagtcccagctactcaggaggtgaggcaggagaatcgcttgaacccaggaggtggaggttacagtgagacaagatcgtgccactacactccagcctggcaccagagtgaaactccgtctcaaaaaaaaaaaaaaaggtgctggaaaagacatcagggtctgggggaggaggatgctactgagcaggatggggtggctattgggggggtgtcagctgctgcagtgtctctgcagtgtggcagaaagagtcctctacggggaagacactgtgctgtggtagaggaggaggggactgtgtgaggctaacagtgtctgcctgtgtcagggcattgggaatcgcctggcacccatggccttcatctcatcttgttttgatttctctaagacttgacactggtgggtttttctggatggaagtgatagagacctagagaaggagtgctagctaaggggaaaaggattgaagaacrgtatgggaaagggctctgggctctggcccaggtggctgggagctttagtcaccaaaggggagcactcagctggtgaaagtgagtcaggaggacttagccttgcctttgtgacacatcctgttgagatgcaggtttgtttgtcagatcatgtatgttcatgtgtgtcgttaaggctctaccgggacctgctggcagctgccctttcacaccttcaaagtatgagtgccagctatgcatccaccactgctgtcagcactggggagctggtttgaacggcacagactgaggtgcctacccatacagatcttaccttaccccgtaagattgtgtggatttcgtgcacctcaccactcccagtgtgggggatctcttgtgtttgcaggggagtgccttttgtgtgcccgacagcatggcagtcatgagatatacagatgcgtttctacagatgagaatgtgtgcagtrtagcgggagcatagctcatacgctgtgagctgaaagaaggccgagggcaggctcaaggaggctcgtgggaggacctaggcggacaaagccagggaggaagcattccaggcaaagcaccagcctgggaagggagggagaaggaagcagagaggagagggaggttccagcatggcttgggcagtttgggttcaagggctggaggtrgaagtgccaactgatactggagaggctgtagtggcaattacggacagctcttacgagcatttttgtgtaatcctcaaacccacatcatggcatgcactgttttactccattgtacatacggtcagaccatgygtgcagagctccatctcggacatgacggtgtggggcatcttgtgtgtgtaagtcggtgcttctcatccatttgcctgacctgaccttgaggaggcctccatgcagggcagtacaggtagagctcctgctctattctcccaggtacccttggctttgcctctttcaagtgttgccattattctagctggtagtgaggaaggtacagctgttctgagtgtcacatccagaccttgacccatggagccaagggccctctgctagtgttgtgtgccatcccagcaggaaacggtcactggttcagtctgcattcctagggttggggatagtctctccctgctgagacacacagcaggggctggacatgaggaagggagaattgggcattgtgctgcgaactgtccaacctgaaggacagtccctagtggatgggtgggtttgggatgctggggagagtgttgtcagcacgtaggctgggctaacctgtgcagtgggtgaaatcagctaggcagagggcagatacaggtcaggaagggagaagagcccaggatgaacccctgaagaactgacatttgagaggctgagtgcaggaggaggcacccacaagagcctttagcagccagaagcatggaagggcacaggtgccaagagagcatgttttaggatagtggccacagcctcttgtgtggagactacaggcctggggaggtaggcacaggagcaggtttctgagcttggcagtgtggcagtgtatcgccttcagcagcttcagtgagtggtgagggtgaattctagattcaagtacactgaaagtgcagtgaggaggcagtgacaacatctttgggcacttatgtcgagaagcctgcctgtggaagaacaaagaactggaccctcagggtagttctgtgtgtgtgtgtgtgtgtgtgtgtgtgtgtgtgtgtgtgtgtgtctgggtgtgttctgtgtatacatgtgtggctgtgtggtcgtgtgtgcatgtatatgtgttcctatgcatgcattgtgtgtgtttctgtgtgtggctcatatgttcatgtgtgttgatgtgtgttcctgtgtacattgtatactgtggttatgtgtacttgcacatgttcttgtgcctgtgtctctgcatgtgtgtgtccttacatgtgcacatgtatccrctaaaaaccctagaaagccggtacgagaaggrtgagccatgtggtctgcttcatacgggaatacagttgaactcttgccgaataagcccggaagcaggaagctctgctctacgttgtaggccttcactgtgttaatttgagactgtgtctgtcacagtcaccacagcttcgttgcacatcttatttcttttgataatccttcaggtttttttttaaagacaatattgtacctttattttaattattatacatttcttacattgtcttatgattctgatggttcttcagtgatccactgaaaacacctttataatcactgaataggatattaaagaagtgtttttcttgactttatcacattgcttttggatctttgaaactggagagaaaagtcgggcacagtggctcatgcctgtaatcccaacactttgagaggccaacaagtttgagtccaggagttcaagacaccctgggcaacatgacaaaaccctgtctctacaaacaattagccaagtgtggtggtgcgtgcctgtggtctcagctactcaggagactgaggcgaaaggatcgcttgagcctgggaggcagagcttgcagtgagccaagattatgccactacactccagcctgggcgacagagtgagaccctgtctctaaacgaatgagcgagtgagtgggtgagtgagtgagtgagtgagaaaacgggtttataagacacaagtgtttcagatagtaaaaaatattttttaagatgaaaaggagatggccgggcgcagtggctctcgcctgtaatcccagcactttgagaagccaaggtgggcggatcacctgaggtcaggagtttgagaccagcccggccaacatggcaaaccccgtctctactaaaaatacaaaaagctgggcatggtagcgtgcacctgtcgtcccagctactcaggaggctgaggcaggagaatccgcttgaacctgggaggcagaggttgcagtgagccaagattgcaccatttcactccagcctgagcagcagagtgagactccatcaaaaaaaaaaaaagaaaagaaaagaaataccatagataacactactatcccgtcacactcattttctttctttttcatttcattttattattagtattattattgttagagatggagtctcgctctgtcacccaggctgaagtgcagtggcatgatctcagctcactgcaacctccgccaccacgcctggctaatttttgtatttttagcagagacagggtttcgccatgttgtccaggctggtctcaaactcttgacctcaggtgatccacccgcctctgcctcccaaggtgctgggattacaggcgtcagccactgtgcccggccctctgtggtgtttcttctgatttaaaatttgtctctgccagtagtatttgtgtataaccttgtcactatggagcagatgtaaggctgagtagctagtgtatgcaaagaaagtgttctacccgttacaaagtagttacagaatagaagaaaactgaggatgtctttggcctgcacgtgtggtatgctgtttttgtagtgggtaaacacagacagtgaaccatctgccctctaaacacacaaagccttcattgttggttttcctgatcgcttctataatgcattttggctctttcagaaatcaagtgtttgtagtgtatgattctaccattttttattacaggggccagacacctgctgagtcggatttccaggtgctcgaaattgctcgaaagttggaaatgtacggcatcagatttcacatggcttctgacagggaaggaaccaagattcaactggcagtttcccacatgggtgtactcgtgttccaggtaggccagtggggaagggaggggtgagaacagggcaggggaggttttctgcaacctggtggggtttgttcttatagatgttagtaaatatttgtcctgatgagtacgggcctcgatttggaagaggggctttgcatatcatccaatccaacctcttactcagtgggaaaattaatcttttgtccttctctgacacacgtgtgactgtcctccatgtcatggagcccactgcttcctgggactgcctcccgcctccttggattccccactgcctcctgccccccagggctgcccactgcctctgggacttcgcattccctcctgggattcggcctacccccttaggatcctaaaccacaaccctgttttttttccagtggagcagtctctgtgctgtggatgtgatctgggctggactgtgagcgctttagagtgggttacagtaatcatttcagtaaacaaactagaatagaatagaaaatatcagagggattgcttgtgataagagtcagtgttgtcttctgaagtgtttgtattagttgtgatgcataggtaaataattacataaatggtgggcatggcctgctcacttccatttgtggttatgtgtgtgtatgctggggtttgtgatgtccaagaagcttaagtgtgactgctagtgccgactagaaggagcttttctccttattcaggccctttgcatatctgaagaaagctcttgcgggggctccccaagtcccctcgcacccaggctaaatatgtccaacttgtctgkgcccctccttttgggagcactccagtcactggcccttgtaaaattttgcacctctgatagactacggtaatcctgaaaaggtctcctcaatgctgaatattgtgggaattgtcactrttgcagtctgggagcccattgcctgcatgagctgctgtttctttgtgggctcttttaacctgtgactatcaaaaagagcttggtctgattcaggcctccctcatcaagccatgtttattattgttttcttttccttatttttcttaacctagccatcaagtttcaatttcctgtcagaaaaaaaattaattttgaatttagagtattatgttacatttcatactaaatgtgattagagagcaataaaaatccatgatagagaccagccttagcaatccatgccttcaggtggagggtctgagcatcccctgcctacacctgctgatgagtgttcccccattgcacagagatgaaaacctcatatccaaactgagccattgccacatttccagaaaaaaacaaataatacaacctaaagaagttgtaaaagcaagggattagaaacttcagtttgaagatagcagactgaatatatgtatttatttttattccctcaaaaccctgaacacaatgacagttgaagraattttttaaacatttaaatccgtaagaacaaagaatgggaaaacagcccacgaaagatgaggatagcagcaatgtttggaagctgggaaatgaaacagggagtgggacctgactttgcagagtagggaaggctggaatctcacagccttcagcggcaaagtcacagtgcaagccaacatgttcccaggagccccagaaagggctcacagttcatgcttatgagaaataggaatacttctttatcagaaatgtaaaattttatcttgtaatttttttatttttatcagccttgtttgtgatagtaaaattctgggaattaaccgttagaaagccagttaaatagcctggcacagtggttcacacctgtaatctcagcactttgggaggctaaggtgggcagattgcttgagtccaggagtttgagaccagctggagcaacatggagaaacctcatctctactaaaaataccaaaaattcattgggtgtagtggcatgtacctgtagtcccagctactcaggaggctgaggtgggagaatcacctgagcccaggaggtcgaggctacagtgagccgagatcgtgccactgcactgcagcctgggcaccttgagtgagaccctgtctctaaataagtacataaataaaagccagctaaataaatggtggtgcatccatgtgaacagaatattgggcaactgtacaaacaaggaagcagctctttatgtcccaataatgagacatccttcaagatgcatcattacatggagaaaagattgaaaactctgtatagtagctactgcttgtggggaaaaragagaaaattatatgtgcactatattccacactattaaatgaactggtgacattaatggccccagggaagagtggccaagctggcaggctttggaacagtgctgagagggagacttgcactgtggactcatttttgaaccttcagaatttgagccttgtgaatgtatcactgtattacattttcacaaaaccttcacaggaataaaacactgcatctmtgaaatgagcaggataccatgatagaaacaaatggagaacataaaaacatttgcaaattaaaatacaggctgccccagtccatccccaccccatgtctcctacctggtctgcacgccaggcaggggtcrtcagcctctttgtcctgcagagttgtgctggcacatgctctgctactttttagcaggtttactgcctggccccacatgcaacaataggaacccaaccccagcagaccctgggctccacaatttcatctccatcatccacagagktatgacagcctcagttctaagcacagatatttaaaattataatataggaggatccaagatggctgattagaagcaactgaggttcacaccactcacgaagaggaaagaaaaggggtgagtggattcaccttcaactgaaatattcaggttcttgcactgaaactaactaggcgaacaactcaacccacagaggatgaagaaaagcgagggtgggggttgatggcccacccaagagcagcatggagccaaaggaacccccatccccagccaagagaaatggtgagtgactgtgcaacctcacccaggaaactacacctctcccacagatgtttgcaacccacagatcaggagatctcctcatgagcccatgccactaggaccttgggtccaatacacagagttgtgttcagtctcagcagagcagccactgaggcacacacagagacctaggagtttcacatacttcagcctcaggacccccagcaaggtgggaaatctgtttgtacaaatccctaagaaggaggctgaatccaaggagccaagcagtatcattctgtgaggcccacttccacagcacctcacaagttaagacccactggcttggaattctagccagccaacagcagcaggctggaaatctgcctgagatggatccaagttcctgcgggggcggggtggccaccatctctagtttggttgactcagccattttagcctgctggctttggagtctggataaggaagagttcccccacatgcagcatacgtactctgcaaaaagcagccaggctgctgctttaagtgggcccctgaccctgttcctcctgactgggtgagccaccccctacaggtgcatttgggccagcaacaagtcagtaccctcctgggatataaagcttttagaggagaaagctgcctgctatcttttctgtttcacaggctttgctggtgatacctccaggtacagaaaaacctaggcaactagggtctggagcaactcccagcaaactgcagcagccctaaaaacaacaggccaggcgtagtggctcacacctgtaatcccagcactttgggaggctgaggtgggcagatcacttgaggtcaggagttcaagaccagcctggacaacatgttgaaacaccatctctactaaaaatacgaaaattagctgggtgtagtggtgggcacctgtagtcccagctatttaggaggctgagacaggagaatcacttgaacacggggaggcagaggttgcagtgagctgagatcacaccactgcactccaccctgggcaacagagcgagactgtctcaaaaaacaaacacctgtaatcccagcactgtgggaggctraaacaagcagatcacctraggtcagaagttcaagaccagcctggccaagtggtgaaaccccatctctactaaaaatacaaaaaaaaaaaaaaaaaaaattaaccacgcacagcggtaggctgaggagggagaactgcttgaatctgtgaggcagaggttgcagtgagccaagatcgtgccactgcactccaccctgggtgacaaagtgagaccctgtatcaaaaaaaaaaacagaaaacaacaacaacatgaaccaaaaaacccataaaagccccattcaaaggtcagcaayctcaaagatcaaagtttgataaacccacagagatgagaaaatcaacacaaaaatgctgaacactcaaaaagtcagagtgcctcttctcctccaaatgaccacaatacctctctggcaagggcatagaaatgggctggggctgaggctgagatagcattattgacagaagcaggctttggaaggtgggtaataatgaactttgctgagctaaaggagcatgttgtaacccaatgcaaagaagctaaggaccatgataaaacaacacaggagcttatagccggttttgagagaaacataacctacctgatgtagctgaaaaacacaacacgagaacctcacattgcaatcacragtatcaatagcagaataggccaagcagaggaaagaatctcagagcattgaagactatctttctgaaataggcagacaagaatagagagaaaagaatgaaaaggaatgacagaacctccaagaaatatgggattatgtgaagagaccaaacctataactgattgggttacccaaaagagacagggagaatggaatcaagttggaaaacatactttgggatatcatccaggagaatttccccaacctaacgagacaggctaatattcaaattcaggaaatgcagagaaccccagtaagatactccacaagaagatctgccccaagacatataatcatcagattctccaaggttgaaataaaagaaaaaatattaaaggcagccagagagaaaggccaggtcatctacaaagggaatcccttcagactaacaggggacctctcagcagaaaccctacaagccagaagagattgggggccaatattcaacattcttaggaaaaaatttccaacccagaatttcatatctggccaaactaaacttcataagcaaaacagaaataagattcttttcagacaagcaagtgcttagggaattcatcaccaccaggcctgctttgcaagagctcctgaaggaagcactaaatacagaaaggaaaaactgttaacagccactgcaaaaacacactgaaatacatagaccagtgacactataaagcaaccacaaaaacaagtctgcaaaataaccagctaggaccatgatgacaggatgaaattcacatataacaatattaaccttaaatgtaaatgggctaaatgcccccaattaaaagacacagaatggcaagctggataaagagccaagacctatgggtatgctgtcttcaagagacctgtctcacgtgcaaagacacacatagactcaaaatgaagggatggaataaaatttaccaagcaaatggaaaacagaaaaaaacaaggcttgcaatcctagtttctgacagaacagactttaaagcaacaaagattaaaaaagacaaagatgggcattatataatggtaaagggttcaacaagaagagctaattatcctaaatatatatgcacccaatacaggagcccccagattcataaagcaagttcttaaagatctaaaaaacgacttagactcccacacaataataataggagactttaacaccccactgacaatattagacagatcatcaagacagaaagttaactttctgaaaatattcaggacctgaactcagccctggataaagtgaccttatagatagctacagaactgtccccccaaaaacaamagaatataaattcttctcatcaccacatggcactttgtctaaaactsatcacataatcggaagcaaaacactcctcagcaaatgcataagaactgaaatcataacaaacagtctcttacaccacagcacaatcaaattagaactcaagatttaaacattcactgaaaaccacacaactatatggaaattgaacaacctgctcctgaatgactcttgggtaaataatgaaattaaggtagaaatcaagaattatttgaaactaatgagaactaagagataacatatcagaatctgggatgcagctaaagcattgttaagagggaaatttatagtactaaatgcccacatcaaaaagctagaaagatctcaggttaacaacctaacatctcaactaaaagaactaaaaaatcaagagcaaacaaacctcaaagctagcagaagacaagaaatagccaagatcagagctgaactgaagagatagagacacaaaaaccccttcaaaaaatcaaatccaggagctggttttttgaaaaaattaataaaatagactgctagctagactagtaaagaagataatagagaataatcaaatgaacaatctgaaatgataggggaatatcaccactgaacccacggaaatataaacgatcatcagagaatgctataaacacctctatgcacataaagtggaaaatctaaaagaaactgataaattcctggacacatacgccctcccaagactgaaccagaaagaaacttataaaaaccctagatgagggctagacacagtggctcacgtctgaatcccagcactttcggaggccaatgggggcagatcacttgatgtcaggagttcaagaccagcctggggccaacatggtaaaaccctgtctctactaatataataattagccaggcatgatagtgggtgcctataaccccagctacttgagagactgaggaaggagaaccgcttgagcctgggaggcggaggttgcagtgagccaaaatcaagccactatactccagtctgggcgatgaagtgcgaccctgtctcaaaaacaaaaacaaaaaaaaccctggaagaaaatctaggcaatgccattcaggacacaggcacaggaaggatttcatgacgaaaatgccaaaagcaattgcaacaaaagcaaaaattgataaatgagatttaattaaactgaaaagcttatgcacagcaaaagaaactatcatcagagtgaacagacaaccctacagaatgggagaaaaattttgcagtctatccatccaacaaaggataatagtggagaagacccaagaactcccaggaagaagagagaaagaagtgtgatttaaaatggcctggaactattccgtagcagtactggaagctagaaagcaacggggctttccgagccagggggaaattgaatccctgaatagactagaaatgtgttgtgaaattgaggcaataatatcctaccaagtaaaaaaaaaaaaaaaaaaaaaaaaaaaagtagcccaggaccagatggattcacagctgaattcaaccagaggtacaaagaagagctggtacaatttctctctctctctttttttttttttttttttgagacagagtttcattcttgttgcccaggctggagtgcaatgtcactgcaatggcagcatctcaaacattaaaaggaaattatttccaaactaattcttttgtttttttttttttgagactacagttttattattactcaaatcagtttccccgagcatttggcgattttttttttaaatttggtgtgtgtggggctctagactagaattctgtgctctgttccacatgacttctgtacagagaaaaccttttttcacacatgtagatttttaaaaaatttaactactactctccctttgtaaggaaaaactagaggagagaatgaactaaaagtgagaaagaaggaaatagggtgctccacatccgagacaggcagaggaagacacaggttctgcctgccaagagagcatccaccaataccagagcagagggcagggccccgggagagagggtagaccagggactcatttcttttgctggacggtgtggaagagtgttaactagggataggtacatgccggtgaagcaaatgaaacgaggcaattaggattctcaaggaaattttgaagaaggaagctttactttataatataaaaaaagtagttaaattcactatagctcagcttgtgagcaatgcttacatgaccattaatataaatactgaatttaaaatttaccaacaattaggagagtgtggggaggggtaggtgtgaggtattggcagtgacagatgttgaggaggcaagatttcaaagtggagaatgtgctagctgtcataaatgtgcttttcagaaatacgggtgaatgaatggatgcatgagagtaaatcccagaaaggcagccaagagaggtgaagctggttctgtctgaggaagaggacttgatgtggagtgggtgaccctgacctggcagtttgtttccagtcgtgtagtctatatggcattttcagatatgccctggattattggatgaatatgaaaatgaaaacagtagattttagcattccacagctaactgtgcaggtttaaaagtgttgtcttaaagtctgtcaagtcagggtgcagtagatgaaagctgtgattgtccttggattttctatttatttctccttttatcatggtggtcaagaccctgggatatacagttggccctccatatccgcaggaaaataaacgataaaaaacaatacaggctgggcgyggtggctcacacctgtaatcccagaactttgggaggccaaggctggtagatcacctgaggtcacaagttcgagaccagcctggccaacatggtgaaaccccatctctactaaaaatacaaaaattagccaggtgtggtggcaggtgcctgtaatgccagctactcaggaggctgaggtaggagaatcgcttgaatccaggaggccgaggttacagtgagccaagatcgcaccattgcactccagcctgggcaacaagagcgaaactctgtctcaaaacacacacacacacatatatgtgtctgtgtaattttttaaaaaatacaaatttaacacagtacagtaaaactatgtgacgtttacattgtattaggtacataagtaatctagaaatgattttattaaagtatacaggaagcccagcgtggtagctcaagcctgtaatcccagcactttggaaggtcaaggcaagagaatcaccagagctcgggagaccagccttagcagcaaagcaagacctcatctctacaaaaattgtaggtttttttgtagagatggtgtgtgtaggttatatgcaaatactacaccattttctatcagagcctcaagatttatagattggggtactggggtagagggtcctggaaccaatcccctacagataccaagagacagctgtagaaatttcttattttgaccagaagggattgaacaagcagctggagcagttatttgggggcctctgagctattgttggcccacttcttgggagggcttcatctcttacctccgtggcaggccctcggttttttgttttgtttttgagatggagtctcactctgtcgcccaggtgggagtacagtggcgcgatctcagctcactgcaacctccgcctcccagcttcaagcgattctcctgcctcagcctcccgagtagctgggacttagaggcgcctgccaccacgtctggctaattttttgtatttttagtagaggcggggtttcactgtgttagccaggatggtcttgatctcctgacctcgtgatccgcccgccttggcctcccaaagtgctgggattacaggcatgagccaccacgcccagcctaggccctcggttttttaagactctgtcctggatatataaataatatctagaactggggctatggggattttgtttccttttgttgatgttttgttttgctttgtttttgagaatacaatttaggacagaaattttgagaatgtagttgaaaatcctccaatattttactttttttttttttttttttgagacggagtctccctttgtcgtccaggctggagtacagtggcgcagtctctgctcactgcaacctgcgcctcctgggttcaaatgattttcctgcctcagcctgctgagtagctaggattacaggcactggccaccatgtccagctaatttttttttttttttaattcctgacctcaggtgatctgctcacctcagcctcccaaagtgctgggatcacaggcgtcagccacagcacctggccttcaatattttactttcagtagaaattagaacgacttagtgttggggcaatattttgggaactaggaagcttaagtcctcatttagaccctaatgtttgtatcttggctttgagaacatctaactcaggatttttttttttttaattgagataaaatgtatatgccataaaattcaccatgttgaagtatacaattcagttgttttaggatacttacacagttgtatgaccgtcactactatctaatttcagaacgttttcatcatcccaaaaagagaccctcatactctttagcagttactccgccagcccccagcaaccactggtatccagaacaggcacccatcaggatattccctctctatggatttccctattttagatatttcatataagtgggatcatacaaacatgcggtctgttgtgtgtagtgtttccttgtttccaggttcactcatgtggtagcatgtatcagtgttttactccttatggctaaaggggtttgttttttcctttggagctgtctctgaggggactgtgtccctaaccttgctgcctcttacactgagtttgcaggtaagagtaaatgttggtaacatcaaacgtatagtcgctgaaatgcccaagcagtgtctcagacgtttttaaaattttattttgaaaccatttcaagcttatagaaaagctacacaaacagcacagaaaggtcctgctggcctttacctgagatgcccgtctgcctttaactggttgtctcagtgttgtttactacagaaggtccaatctaggagcaaatgctgtacccaggcattatgtctctctggtctctgcaatctggaacattcttcctcctttccttggttttcatgaccttgacattttggaagattacagggcagtcattttgtagaatgtttatgatatgggattgtgcagtgcttccccaggatcagaccctgggctcactgcctaggtgagaaactcccagagtgatgatgcgtcctgattcatgtggcacatagggtccatctgtcccattggtggtggtggtggtaacattgatcacttggtcaagatgatgtttgccagcttttctgtatacaaagttgtttttgactaggtagtggctcatgcctatagtcccaacagaggctgaagcaggaggatcacttgaggccaggtgtttgagaccagcctgggcaacatagcaagaccccatctctacaaaaggtcctgctggcctttacctgagatgcccatctgcctttaactcgttaaacaagaaaaaattaaaaatagaaaattagccaggattggtatcaggtgcctgtattcccagctgctccagaggctgagacaggatgattgcttaagcccaggagtttgagactccttatctcttaaggaaagaaaggttactttttgtcctttgttactaagtattttgtggagcgatactttgagactaagtaaatatcttgtacctcatcacactcatcttctagttagatcactatgatggttgcccaatgatgactctttaaatcccattcttcctactactggaaggaagagttttctctccatttatttagtttatgtcactgtggattcatagattcaaatctgatacttgataatctgttggtttcattatttatttttatctttaactttcccacatttggcccaagggagactcttcaagctgcctcttgtgtccttctcacatgtcctttcattttatgaacacttctttgctttcttacagaatragacatgccaggcttgttttgtactttgcctgcttcactgtggagtcagccatttccccacagagcccagccgttttagtgaagactggtatttagagaccaagatccatgcactcagtgtgcccattgctttgtggggtatcaccacttctggccctctcaacagacaatgctacacacatgtacatatacccactcacctcatatatctatatttacctctatatctgtgtctgtatctgctgaaaccaggaattcccatcattcgctcctgttacactctagcactgtgttctagcttcagtgagaaacctgactctactccctgccctgcctggccactatcactgccccttccagaccaccctccttgcaggagtgaacttcaaaaaatgtatattaacattgattktaaaattttgcaataaaaccttatcaaagaaattaaaattagccaggcacagtgggtcatgcctgtaatcccagcactttgggaggcaaggtggactaatcacctgaggtcaggagttcaagagcagcctggccaacatggtgaaaccccatctctactaaaaatacaaaaattaggtgtggtggcacacacctgtagtcccagctactcaggaggctgaggcaggagaactgcttgaacccaggaggcggaggttacagcgaatggagattgtaccactgcactccagcctaggtgatagagtgagactctgtctcaaaaaaaaaaaagaaaaaaagtgcaaatctttccacttctaattttccatttcctataaatatttgaaacaatatgaggagagatacaagtcccagtgtatcttcctggtgaattgcttttagatgatgtaagccctctttctcatgcactgtgtctgatgataatattgctccagcagctttcttttggtcagttgttaagtacatctttttccatctctttgaacctttcagtgtccttgtgttccagatgtgcctcgagtttgagaccagcctgggcaacagagcaagacctcatctctacaaaaaaaattaaaaatagaaaattaggcaagagtggtgtctggtgtctgtagtcccagctgctccagaggctgaggcaggatgattgcttgagcccaggagtttgaggctgcagtgagcggagattgtaccactgcactctagcctgggcaacagagcaagactccatctcaaaaaaaaattaaattatctttctagaacagatagattaatatgtttagttattgacattttaagtcagctatctcagatataatggtaaaatgccaagtagagtgctgtgttggcaaggatgtaatttaagcattccctatttcatgagaaaggggttatgtgccagatacaaatgtaatctgtctgtctcttgcatttcagggcaccaycaaaatcaacactttcaactggtccaaggtccgtaaactaagcttcaagaggaaaagatttcttatcaaacttcatccagaggttcatgtaagtattattttcaactttttatttttattttattttatttatttatttatttatttttttgagacggagtttcgctcttgttgcccaggctggagtgcaatggcatgatctcggctcaccgcaaccctctgcctcccgggttcaagcgattctcctgcctcagcctcccaagtagctgggattacaggcatgcgccaccacacctggctaattttgtatttttgtagagacagggtttctccatgttgttcaggctggtctcgaactcctgacctcaggtgatccacccgccttggcctcccaaagtgctgggattacaggctcacaaagtgctgggattacaggcgtgagccaccatgcccagcctattttgaccattttttaactcataatttattctgctaaaacataattactttgtaaatcatttcagcataatgcacacaagaactcaaggacaggattcgggacttaggtctggaggggctgagggcagtctgcctagctggtctcacacttacctcccccaggaactttgtcactcacgtgttgctggctcaaaaccccagggtttcagcttcagcgggtctgggatgaacccaagaaggtgcacatctgacaagctcctaggggttgctaagaaccatggttattgcagcctctttgttctctaggtaaggaagctgaagaacaaagtgctcaaaatgatctgaagccctacagcagctgagagcttcagaatgaactgaggagtatccccagtgttctcttgtgtccttcattcagaaattgatctttgaatagctctaattgaagaagccttgattatcagggagtaaatattcccttctttactgactgctcattaataaaataataattacatatgaatttactgaaatgagtaaaaatggaaaaaataaatgcctgtgcagtgtatttggtaaaatccagtacttccagttattcaaagatgttccagttgctgcatttccgttgtacaaaaggagttagaaaataaaaagtagatttgccaagctaccatggggtttgaagcttaagagatggccatgcctgtgtcagcccagacacattttgggttwtgggagatttagagcctttgggccagtcagaagaaaagctttgcctacgcctttaaaaggcacttgagtagtagggcttttggtacacactgggttcacgtgctttgtgtaagtgtgtttgcttttggtagaaggcttgaaagtggctttaattgttgtacaaatatctgtcctgtggatgaaggggaagtagaaggaatgccaaacacacatacgaaacacaagtaaaagctgttttactctgtaagtaaaaaaaaaaaaagtttcctgcagttattcgagatgatagggaaagttcaccaaagcagctattaacttgaatagggcgataagtcaaagcccagaactgtttgcatctgcacttagcaaagttacattttacttacctaagcacgttttaaagactaaatgttagattcaaagtattacagtctttgtggaaggtaattgggtaacatacatcagcaggttcaaaaatgtgcagtctttgagctcagatttccatttctaggaatttatcctaaggaataactgagagtgaatgcagttccttcagggcaatatttgtaggcctgaaaactgcatgtcctggacatctaaaatatcctagattttaaaaatatataccatgtagaaacaattcagtaataacatgtaaatatgtcagttggcatgaaaaatgccaaggctaggtagaaaaagtgtttacaaagatagaattcaraatgttgatagttgtgtgattgtgggtgacttcatttttctgctagttctactatgaatatatatactgtctatcttttcttaattaagcagatggaaccagaagactttgtatacaacttttaraaaaacccttcctgggctgggtgcagtggtgcacacctgtaatcccagtaccttgggaggctgagatgggcagatcacttgggctcaggagttcaagaccagcctggccaacatggcaaaaccctttttctacaaaaaatacaaaaatcagctgggcttggtgttgtgagcctgtagtccctactgagcagtaggaggggagcggctgaggtgggaggattgtttgagcctgggaggttgaagttgcagtgagccaagatcacgccattgcactccagcctgggcacagagcaagatcctgtctcaaaaaaaaaccttactgatttttaattttggaattccctatcgtgtgatctgcttcctaaatgtactttctcttgtccaatacttcattcttgaattaattaacctttgtgttttgtttctagggaccttaccaggacacattagaatttttgttgggtagtagagatgaatgtaagaacttctggaagatttgtgtggagtatcacaccttttttagacttttggaccaacctaagccaaaagcaaaagccgtcttcttcagccggggctcctccttcagatacaggtaggggccatgccgtggcttgcatgggcccctcactggtttgtaaagctgagaaaataggtaattcctagtcaagaaagaagtgttataaaatatttcagagaattacacacaaagtggaggtattgtgaaagaataactagaggaagcatatgaaataaaataacggaaaaaatacgcttaataaaaactttgcttacaaattcagttacgcttactacaaagtataactttaaaatatgtatgtgggccgagcccggtggctcacacctgtaatcccagcactttggaaggccaaggcgggtggatcatttgaggtcaggaattcgatatcagcctggccaacatggtgaaaccccatctctactaaaaatacaaaaattagctgggcgtgttagcgggcacctgtaatcccagctactcgggaggctgaggcatgagaatcgcttaaacccatgaggcagagatcacgccactgyactccaccctgggcaatagagcgagactcagtctcaaaaaataaaatatatgtgtgtatatttatgagagaggatgggtaaatcttttcttttgtcttttactctgaaaaattaatgctgacttactgttctttattaaaaatctgaatctttattcacagtggaagaactcagaaacaactagtagattatttcaaagacagtggaatgaagagaattccatatgaaaggtaagctctggcctttatgatgtaaagtgtgtgcttttaaaattaaaatttaaatatatatatggagagagagygaaaagagagactgagtcttgctccgtcacctaagctggaatacagtggcatgatcacggctcactgcagcttcagactcctgggctcaagcaatcctcccacctcagcctcccgagtagctgggaatataggcgcacaccactatcccctggctagttttttttgttttttttttttttctgtagagacaaggtcttgctatgttgcccaggctggtctcaaacatgtgggctcaagtaatcctccaacctcagcctcccaaagtgctgcgattataggtgtgagccaccatgcccagcctattttaaatattaatctttacttgactgaaagtcacttcaaatacatgaatgtgtatttttacaggagttcagtttcaatgttttaaagaaagtggatttgtaatttttttttttttttttttgagacggagtctcgctctgtcgcccaagctggagtgcagtggtgcgatctcggctcactgcaagctccgcctcccgggttcacaccattcttctgcctcagcctcccgagtagctgggactgcaggcgcctgccaccacgcctggcaaatcttttgtatttttagtagagatggggtttcactgtgttagccagggtggtctcgacctcctgacctcatgatccacccgcctcggcctcccaaagtgctgggattacaggtgtgagccactgcccccggcctgtaatatttttatatagacattgtatacacatagagatatttttagtttctcttctgtatagcttagcttatatatatttttacatagtatagtaaattttttttttttttttttttttgagatggagtcttgctctgtcgtccaggctggagtgcagtagtgtgatctcggctcactgcaagctccacctcctgggttcacgccattctcttgcctcagcctcccaagtagctgggactacaggcacccaccaccacacccagctaattttttgtatttttaatagagacggggtttcataatgttagccaggatggtcttgatctgacctcgtgatccacccgcctcggcctcccaaagtgctgggattacaggtgtgagccactgcgcccggcctatagtaaacatttaatctgaaaattcttgttgtttctccgcacgtggaattttttcctttagtgtgggtgtgtaatcttacctctcttgggacctctgttttttatttgaattcttgttttccattctcctgcccctttcaagttagatacctcttagctacattttcttgtgaggttttcttcatggwtacagtacatgcttgctgctttaaaaacaggcgctgagaaggggagggcttggtttctcacagctcgtcctctgttttgcagaaggcacagcaagacccacacgtccgttcgagctctgactgcagacctaccaaaacaggttagtctcttccggttcaacatgggggcagtaggagttccctgtactcttttggaaaatagtctgtcagtattgtaacaagagtcttaaaattaatcatattatttaatgcagcaattgtaatcctgggactctgttttcagaaaggggtcctgaatagaaagccagcagggcagtggcccatgcctgtaatcccagctccttgggaggccagggcaggagggttgcttcaktccaggaattcgagaccagcctgggcaacatggcaaaatcttgtctctacaaaaaatacaaaaattagccgagcatgatggtggcgcacgggtagtctcagctactcagggagctgaggtggaagaatgtcttgagcccaggaagttggggctacagtgagccaagatagtggcactacactccagcctggatgacagaacaagatcctgtctcaaaaaaaagagagaaagcctgtatgttgagatgtgcatcatagtgttgtgtgtaatacaccacaaaatcctgacaactctcatctgtgccagatgacttactaactrtgtttttagctgtattcacttagtaggattttttgttaactgctgaaagcatggcttaaaaagagtatgtggtaacatggagaaattcttgctgttatgttacaaatgaaaagcaggaaacaaatttgtatctctatgtctttggcatgattgcaactatatcaaaacaaagatacaccaactyacacagacacttcatacaaaaacatttgacaagaatgtcccagaatgtgacaacagctgttccgtgccactgtgatgggacatcagcgaccttctcatgtttcaggtctacttcactacagtcccttcccatttttatgctggcatgttaacttccatatgcaagcatatttttacattgaatcttgcatgttttgttttgttttaccagagagagtcttactctcttgcccaggctggagtgcagtggcatgatctaggctcactgcaacctctgcttcctgggttcaagtgattctcattcctcagcctcccaagtagctgtgattacaggcacataccatcatgcctcgctgacatatacatatatatatatttatttatttatttatttattttttttttttgagacggagtcttgctctgtcgcccaggctggagtatagtggcgcgatctcggctcactgcaagctccacctcccgtgttcacaccattcacctgcctcagcctcccgagtagctgggactgcaggtgcccgccaccacgccyggctaatttgtttgtatttttagtagagacggggtttcactgtgtcagccaggatggtcttgatctcctgacctcatgatctgcccgcctcggcctcccaaagtgctgggaatacaggcatgagccaccacgcccagccgcctggctgatttttgtgttttttagtagagacatggtttcaccatgttggccaggctggtctcgaactcctggcctcaagtgatacgcctgccttggcctcccaaagtgcttggattataggcatgagccaccatgcctagtcagaatcttgctatttttatgtaacatatcataactctttcttcatggtgctacagtttcaacttttatctctgtacagtgtcaatttttttaatggtttgtcatttatactgtcatagcacttcagaagctacacttgcacctcattatattaaaggtcatgtgaactgggcacartggctcacacccttaatcccaactactcaagaggctaaggctggaggattgcttgaagccaggagtttgagaccagcctggacaacatagtgagacctatctatctgaagatttttttttaaattagccaggtgtggtggcactgaactatagtcccagctacttgggaggctgaggtatgaggatcacttgagcccaggagttcaagactgcagtgagccacaattgtaccactgcaccccagactagacaacagggtaagaatgtctcaaaaagtaaagctcatggtatcccagkttttttcatgggtacatgaaaaccttcttaaactctctggttttttttttttgtttttttttttttgagacagagtctcgctctgtcgcccaggctggagtgcagtggcgcgatcttggctcactgcaagctccgcctcccgggttcacgccattctcctgcctcagcctcctgagtagctgggactacaggtgcccgccaccatgcctggctaattttttttgtatttttcagtggagacggggtttcactgtgttagccaggatggtctcaatctcctgaccccatgatccacctgctcagcctcccaaagtgctgggattacaggcgtgagccaccgcgcccggccaactcttttagatatgtttcctctttagaaatttcttgttaattcaattgaaattaaagggaaatgtatttttaattgttcctttacacagtttgatttttttttctttttttttggagacagggtctcactctatcatctcggctgcatgatcacagctcgttgcagcctcaacctcccaggctccggtgatccttccacctcagcctcccaagtagctgagactacaggtgcatgccaccgcacccagctaattttgtatttttttttgtagagacagagtctcaccatgttgcccaggctggtctcaaactcctgggctcaagtgatccttctgcctcagcctcccaaaatgttgggattacaggcatgagccagcatacccaaccacaaagttagaatttttttttcttttttttgagacagagtctcgctctgttgcccaggctggagtgcagtggtgcgatcttggttcattgcaacctccacctcccgggttcaagtgattctcctgcctcagcctcccaggtggctgggactacaggtgcatgccacaatgcctggctgattttttgtattttttggagagacagggtttcaccgtgttagccaggatggtcttgatctcctgaactcatgatccgcccgactcggcctcccaaagtgctgggattacaggcgtgagccaccatgcccggccttcaaaagaatttaatgtcaaaataagaatcatctaaaagttacctttaaggacaggcacagtgactcaacagctgtaataccagcactttgggaggtcaaggcgggcagatctcctgaggtcaagagttcgagaccagcttggccaacatggtgaaaccccaggtttaataaaatacaaaaattagtgaggcatggtaggcgcstataatcccagctactcgggaggctgagaccggagaattgcttgaacctgggaggtggaggttgcagtgagccgagatggcacattgcactccagcctgagtgacaagagtgaaacttcatctcaaaaataaataaataaataaataaaacctttacgctttcaattttcttccattccattttaaaagccacatgagaatattgaatatggttgaataattgagacatgataagatcagcatttgaaaataggttaatcttatggactgtggcctactattttgtttctgaaagcctagtaactaagccttgtgcagttacatttgcactttttacatatggtaacacgtgcatgtgtatattgcctgtgtacatattgcacaaaaagttattcagttgtgtttggttatattttggtctgaccacactcttaacgatgtggcgtgtgtatatatagtaagggatgtccccaaagcgtgactgcatcccgtgatagcgcgcgaggagtgacgcttagtgagtagagggggctcagccgtgtccttktgtgtggaaccatgaggggaggatgtgttagggcacctatggagtagcaggtgatgcagcatagccactggacatctggtcctggcccctcagtatttcctcatcctgcttgggagctgcttctccctcagacttgtggccactcctgtgcttttggaaggccccaggtctcttgtgccactcccattggcaaagggcatcctaggcagtgaccctcaaccttcccttacatgtatgagtggattggtgtgtgtcctaactccctcgcgacgatacatctctgacagatgagtgcgcattactgtagaacttggacttgttactcacctgtcagtactgtggtttagggttctattggctgagtggaatggttcactccctctccagctgtattttacccctcaacaaaactatgaatctcctggtaacgggattccaggaagacgtggaccacgtgtcattaggttctgcaagatggaggttttcttggccaggcatggtggcatgtacctgtaatcccagcatgttggaaggcgaagatgggtggatcacttgaggccaggagtttgagctatgatggcaccactgtactccaccctgggcaacagagcaataccctgtctctaaaaaaattaaaaattgtaatttaattttaaaaacttttctttattgtggatatttcatgtcataagagaaaaaaatggaattgtaagggtttgtaaacagacgatcctgggttgatttgcaatgctacttttacaaatcttcagttctacaagggaaagtctagtgaattgcccattttcatgaaagctgtgatagaaatgtgtggatgccctaagttaggccaggtggctttgcaacttctagtggtaatttgtaattttatatcctttttttcttttcttaactttggttcccagagcatctcattccccgagggattgaggacwcctgcctccccatcttcagcgaatgccttttactcgctctctccctccactstggtcccctctggcctgccagagtttaaggacagcagcagctccctcacagatccccaggtttcctacgtcaagagtccagctgcagagaggcgcagtggagcagtggctggaggccccgacacaccatcggcccagcccctcgggccccccgcactccagcctggtccaggtgtcgggttttgtcatgtcgtgagcagctgtggttctgtctgtgctggggggcagagtttcagtgccttagacctagacacagggagggccggtagggagctcagcgctgcttgtaaaaatgacaatggtggggatgactttaccacaggctcatttccttccggtggggagcaccggtgtgaccggcagtgtcgtgggggggcccctgctttcacattgacaaatgcccagctgcaggtatctgaggagttcatagacgatgacccagcagacatctccttctttgctggaggctctgaggcgttttcttttccttatggctctgtagtcccacaggaatctcaggcctctgcccagcctctggtggcccctcctttgtgtgagcttccagggtctgctcggtccagcccagacaggtactccatggaggcagtagatatgaacacagaagacggttttgcatttgaggaggaaagtgacttcaatgggaacgcacacccctcagacacctcggagctatttgaggtgaaggcgcaggccagccggatgcagcgcctgctgggtccttctgagaccagctcactgagaaacagccagtctgaaaacagctccctcaataacatgccactacgtggtgggctgtctgtgcacacatgcagctcagccagtcaatctgaggccagctccatggtcaacttcccagcctactcagtccgctctgagtccagctcggccttccagttctctgacatcatcgaccagttagagcagctcagctacccacccacgacggccgaggactccagcagcacagagtcagactcatgggactctgaaaccgaggcccccctagacataagccttttcttcagcaacccttttgcacacacaagtggagaaagagtcccttttgatttacagaacaatttaaagaatttgactccaggagagcaaatagataaaaacccatcttgaccactctgggttcctttacaaggcaacccactcacccacgctgtgtggtttagagctcagaattgtttggtttaaacacagaaagtgactttcatttcatggatagatattcaatttttttttaatttcctgatttattatacttttttgaatgtcaaaaaatttgacctttcacttggaatgaygtaaaagctatgcctccggtcttagacctgagtactccagccagtcctcctagaggaccgataaattagtctttgtagtttatgttttttgccatatgctttgattcaagtaagaactggtgctatacattctgaatgttacacaattctgttcatgttgatcttcaatagaatatgtgtattacactattgatgctgcttttcaagatgagccctgttgcctataattaactaggacacaggttttgtctcacttgtccagccactgcgctacacaaaaccttgagtatgcctctacagccctaaccctgggaaagatggccataggccatggcctcctgtgtgctgtggtcaaactcgtgggactctgagaccctaaggcccccgtagacattagccttttcttcagcaacccttttgcacagacaagtggagaaagagtcccactgggactctggggggacagtcatccwttgcactggggttgggggtgaggggatgcctggaactgtcccagtgccaaaggcaccatgtcatttttttttttaaaggtgtcaaagggccactgcctcattattgacttgagacccagaaatagtgctgtgtgtagatagtggtcttggagaggcgttggtttaaaatgcacttatgtaagtttgagctgttttcttttcttcagcttaattgggaactagaagatacgtggttgcaaaaaaagcagaaccagacacaccatgggcatcattctgtcccaggacaatgggaagggtcccaggggcaggtgtgccaaggtggccctgcccacccatccagcgtacccgtaaacacataccaggtgccatgggccctgctgggtaccacatggagagcttctcagtctaaaccaccataaaagtcaaggctgatgtttgtggcacagagtgggtaggtccatccagggacgtcatggggaaaccactgccatgcagctcagcacccacaagtgccggtctcaggccagccctagatgacactgttcaatttgtcaagtccacagatagggttggggtttttgttgtttttcttttctgatcttacctagtagtgcaataccacatttaaagtttaattctcttcccagaatgtcttgtggaaactttacatttcattcctgttcacattgtaagatctctgatgttttgcctggatggatttactgtgattgcacagggaccacgtggctcaggtgtctgagccattgagggcatcttgcaagggctggttttccttttctcatcagtgttggctggatgccagcaggggttttgtggctaaccacatcaggcagtttcccatttttgtagctttgttatacctaaaccrcagtctcatcattttgcttatgcagctagaagtttcagtctgtatagttgttattcattctgtccctggtaatttagacctgccttcttgatgctttaggggccattgggcacagctttctacattggctaacaaatacctgtgaaaatgttaacagacagaagcgcagcagtgaacctgaggtcaggacaggactgtttgggaggttcttcttttcttactgtcactccaaaaataaaccttggatttgtktgctggggagaaatgagtatagataacatttaaaacgttttcctaaaccttagtattcatatggtagctgatggttcctctccccttcattactgttgcctgacgacggtccttgctgatgctgtgaactaacaaagttgtctttttgtttttaagggaacccaccctggcgtctggacakcaggttaggtttgggtggttttgagctagcactgctgtggggcaggggtggccgctccctggtgaagctaatgctgtggaagctggaatgttccttcctaaggagtgggatcatgcccctaccccagcagaggtatctcatcactcgctcatgtgcgagattctaaataaattttgttcttgggcatcttctactaggcctcctataaaatagatcttgctgtttttggtttgtgttaatggaacctcactttctagagataattctttagttttttatttaggaagttttcaaaatatacaaagcaggaatgtaaggaacccgcatcacctcaaattcagtgttacccacacttgaccatgcttgccccagctgtgccttttttctttccttgggtattttgttgctaaagtattttattattactgttttagagacagggcctcactcctgtcacccaggctggagtatggtggcacagtcacatctcactgcagcctcaacctcctgggctcaagccatccccccaccccagcctcctgagtagctgggactacaggcacacatcactgcgcccagctaatttttaaaaaatttttgtggagacaggttctcttcatgttgcccaggatggtcttgaattcctgggctcmagcagtcctcctgtctcagcctcccaaagtgccagaattgcaggcatgagcctgggtgctagagcgaggccctgtctcaaaaaaaaaaaaaaaaaaaaatcaatcaaggctttcttccgagttactgctcacagccctcttacccctttctcttgtgagtgggttgtaatgtccacccagaggggatttaracacggaagggaaggcaagcgtgggcaccatggctttagaaccataaggaagacatttccctctacagattctgtctttccacttgtaacagttaatgaggcactgacgttgctcttttccaccttaacaagacagtttacagtggttaaatagcaaaactccaggagcaattcagcctgaggccatagtgccctgcagcagcaytgggctctgcttttgtttctgctttgtgctttgtggctcttcttcaagccagtgttgggtagtgcacagcctgagaggtgtggcctgataaaccctgaaattgaaagaagtatgcagatttgactcagcactcctggaagtgtctggatacagctcactgagagtgtggaggtgaaagtgcctgcaaaatattaacagttctctctcaatctattgatctcctcagttacatccagaaccttaaagccgcacagttgtcatcctccgcccgcagtctcaggcagggcgcmtcaggggctgcactggtagctcccaggaggacttacccatgggtcaccgtcatagccaggtgtgtctactcagrggggacgcaatcctgcagcagtccccgtcaatgagaggccaccagcagacagtgcctgttggacccatgaagtccaccactaattatatactctgctttaggtagaatatttttattagctgtcaaactgtttttgtatttaagtttccaaaagtccaggtactttatgtaggccaatgtataaatatttcaagtctaacagtagcacagttatatgttaatacaactgactacacgaaaaatatgtaatagcatatgctatgtaatttttcaaatcactaggtattgatatgtgccttttttatattaccaagagattctctaaatatggaattagattaggattctctgctccacttaacacacatttttaaattagtactgatgattgagggatggacaatagcacaccaaaaaaaaaagagtttagtatgaaaaatttaaacctgttggttaagtcattcccattaatgtcattttgctgagggtgacttggtccttttgaattgctttggtgtacgggtatgttctgatttttcatgcaagctcctctgccattccaccgctctgaggagtaattgtagcacttcacatgtgctgtggttgtgatcacatggtgacatacatagcatgtgtgttcccagctgttgtgtgtttatgtgacatttgatgccaatacatatgtcttcaaggtatgcttgttccctcccagctcgtggaatatcaaaaaaattcattgctggaaaaattatttcatagacaaaaatgttaatgttctcttggggacttagagttgaaaatatttgtatagatttggttctcaagtccacagaatcgtatctgctgtggtctccctttggtgctcatctgggagccatgtgtatggaagattctgtcacaggcggctgggatgtgggcagatgctgttagcctccctctccacgtggtggtccatgcctgacgtgtcccctagttcaaggaagcgccatctttagcatgaaaacaattgcgttcccctaggaaatgaagaaaaaatgagctgaaatttccttatacatttgaatttgttcattttttaaagagacatttttgttgtctgctttgtggtacttataaaatttgttttccattgaaattgccatttataaatttgcagatatgtactaatttagatttttttaagtgttcaataaaataaggatatatttactgtgaatttttaaatgggctttttagctttctttccctctacttttagttttgatttatataagttaaagattcttttgcatattaatccctgaagcagctgcatattttttataacagtgtcactgacatcttcataggcttctgagcaagaaacagggaacaggcaccatgactcttgtgcagattgtcttgttttaatatgggtgatgatgtctgtggaaggccagtggggaaaggtgccttgcttcttcttggtcttagctctgtcagtgcttcctgctctcgcctggtgtggcctgcacggcagagctgggtgtyggggaggacgtgccgtgcaggcccccaccacaccccacggggcgggccttgtgtccttgcacttttaccgtgcacagaacagatgctgttggcttaaaattctgaaaatgaggttattattgcctgttttttccacagtcagccaaaaccaccctgtaaattacaggggaggacgtgaacaagagacccctgccccagagtgcaacagctctgcaggttctgggcaaggctttattccactctgagcttgagtttcccatttggccaacacgagtttctgctgcctccgtggaatgtccatgcctctctagccccacacacgyctgcgggggtgggggcagggctttggacactgcctcctgcttttgagccctgtgaggataggctcctcaccttgcccttttcggaccttggagcagcacagagctgcagccactgatgtcaggcgcctctgggaaggtggtggtgcctccccrgggctctaaagcacctgctgcccagtgggcagggtgctcagtgagcacctgaggccagggtgggaggcacctggcagtaagcccttcctggagctcagcaattgtacctgccacaccagagcagaggggctgtggcagcagcatgttctagaaaggcacttgtcagaacaaactcatgggtctcctcagagcccatggatgggtagttacttcccacttagaggagagggaaaagagtcccaggggcctcacttaccccccctacatcatgccagccctgctccctgaccatcaccctcctggtcctggggccacccctgcccagcatccgctgcctaaggatgaagtgggaggcacctgggtgcctaaatcctgatttcaagaaactgctcaaaagcatttctgtatgaggtctataagttgactgatttagatggtaaaaaccatgtggcctttatrttcttcaaatatgtcagttcagattatatttctttcctaatcctaataactatcaccctttatttagtttactttaatagtttgttttcgggaccttgcctccattgttccaatagaaagattaataagtcagagcatgcttctcaaagttttggacacaatgtattagaacaaaaacrtagaggctgtggagcaccttcacttattcaagaggagaccgtacacctggcagatagcagatctggacaaatggcccaaagcacaacttgctgttataggttagaacacctgtttttcttaggaaggaaaaggtctcgtttatttagcgcaaaacaggaaagaaacaaagattattgggagcacttcgtgtgttgatacagttgtctgaaccatgggagagcagcagcggtggctccaccktgtgctgcctaccaagccgtggtccaaggcttcgtgtgtcagctcgttaaaaccccaaatggcccttgggaaagctgtgccatgcatcacaccttcacgtcctgtcctgtgggcagtgatgccgggtagggaggtgagctgaatgcacagtaagagatgaaccaatacctggaccccttgccattaaccatttttctatctcccrcttgtattctttgagccagattttgtgtaagakccactcatgacatcctcttccagtagagaagccagaaataattttcggctaactcatcaggttcacatttacttggatcccttggayagttccacattttccttttcttctggaattaacaattcatttggccgggcgcggtggctcacgcctgtaatcccagctctcagggaggcaagaggcgggaggatagcttgagcccaggacttcgagacctgcctgggcaatatagcgagaccccgttctccagaaaaaggaaaaaaaaaaaagaaagacaaaaaaaataagcgtaacaattcattcattgagcctcagtttcctgtaccgcctctgaagtcaaccttcaacttgaccttgaattttgccaagcaggagctgattcttcctccactaataggcaaatattttcaagaatcatttgttagagttttaaagaggagaatttaaaagtatgaaataaaaataactttacctttttctctaaatgtgatatttctctttcatcatctagttagatgaataaaaacagtgtcttgaagggaaaagtgaaggtaagcacaaaagtttaattaacattgtgatttttaaatggcatttcagaaatcatatgatgaatattgagaaaattctggaagtaaagagactgccacaaagaaaatcacctgccagaccgggcgcagtggctcccgcctgtaatcccagcactttgggaggcgaaggagggtggatcacaaggtcaggagttcgagactagcctggccaacacagtgaaaccccatctctactaaaaatacacacacacacaaaaattagctaggcatggtggcgggtgcctgtaatcccagctattcaggaggctgaggcaggagaatcacttgaacccgggaggcagaggttggagtgagctgagatcgctccattgcactccagcctgggtgacagtgcaagactccatctcaaaaaaaaaaaaaagaaaatcatctgccagagatgcccactgccgacagtctgaaataacagttttaaattttatgtcttttggccaggaatcagagcactttgggaagccaaggtgggaggatcattttagcccagggagggagtgagaagttcaagaccagcctgagcaacatagcaagaccccatctctacaaaaaactaaaacatagctgggcacagtgacatgtgcctgtgattccagctactcggaaggctgaggtgggaggatcgagcctggaggtcaaggcaaagctgcagtgagccatgattgtggcactccactccagcctgggcaacagtgcaagaccctgtctcaaccaaaaaaacaaaacaaaaaaggccaggcgcggtggctcacgcctgtagtcccagcactttgggaggctgaggtgggcggatcacgaggtcaggagttcaagaccagcctggccaacatggtgaaaccccgtctctactaaaaatacgaaaattagctgggtatggtggtgtgtgcctgtaatcccagctactcaggaggctgaggcaggagaattgcttgaacccaggaggtagaggctgcagtgagctgagattgagccactgcaattgcactccagcctgggagacagagcgagactcagtctcaaaaaaggctgggcatggtggctcacacctgtaatcccagcaattcgggaggctgaggtgggccaatcacttgaggctaggaatttgagaccaacatggcaaaaactgtctctactaaaaatacaaaacaattagccaggcacagtggcacatgcctgtaatccccgctacttgggaggctaaggcctgagaatcgtttgaatccaggaagcggaggttgtagtgagctgagattgcgccactgcactccagcctgggcaacagagcaagactgtctaaagaaaaataaatatatatattttgaagatgatcaaatcttgttatttgctggagtgtggtggcctgatcatggctcactgcagccttgacttcccaggctcaggcatttcttccacctccacctcctgagtagctgggactacaggcaagcacaccaccacacctggctaaatttttgataattttattaatttttttgtttttgtagagacagggtttcactgtgttgccaaggctggtctcaaactcctgggctcaagtaatccacccacttcgaccttccaaagtgctgagattacaggcatgagccaccactcctggccaatttgccgctttgagagtatttcagatgttattcttttcccaaagtgcagtctatgcaatgaagcccattggtgaacagccagtggacagtttgtgatccatcccagcaaaagtgcagagctcagtaaaacataactactgtttgtatctctcaatttcaagtcttttaatgttggcaattgaagtcttgtctatgggtaaagaaatcagtccttgaggatatagtgagatagctgggcctcatctttgtgtgtggtcggtgtgtcctcctatgagttgtatatgatacgaattttataaaagggactctcgaaactcagagcaagactgattcttactggctgtttctcagtagatgacctcggatttagagtttattttttacagatacctaagattaattatttaccatgtcaagtaaagctaaacatattctgtggcacctaaaacttgatatttagcattttaaaacttctctgcctttttttttctttttttgagacacagtctcactctgttccccaggctggagtgcagtggtacgatcttggctcactgcaccctccacctcccgggttcaagcgattctcctacctcagcctcccgagtagctagaattacaggcatgcacaaccacacccggcaaatttttgtatttttagtagagatggggtttcaccatgctggccaggcttctctcaaactcctgacctcatgtgmttcacctgcttgagcttcccaaagtgctgggattacaggcgtaagcccggccaacatctgcttttaaccatgcattctgatatgcattatcagtgtcaaaaagattttctaagacagaggagcactacggccaagtgtccttttatgatatccacagaattcaaaattgcagagcctaaaaggcactaactttatcctgtcgtatgtcactgtggaaagcactcttcagagccatgttcccacacttgttttctcactgtggagtacatctgtgttggtgacttcagctaaacctgttccccagggataaatrcaacagcccatacaaaatcaggcatgaggacacagtccaacaacttcgtgtataaataaagttacacattcatcgccagttgcttgttttaaaaataaaaaaaaaaagtctccccacagatttactgactttcatgtaggatctgtgtttgtgtaatttgaagtaggcttgatttataaggtttgctatagctaacatttaaagaaatgtttaaattaggcacagtggtgcatgcctgtagtcctagctacacagaaggctaaggcaagaggactgtttgaggccaggagttcaagttcagattggacttcataagatcccatccattaaaaaaaaaaagaaagaaaaagagtctgggcacagtggctcacatctgtaatcccagcactttgggaggccaaggcaagtggagcacctgaagtcatgagttcgagaccagcctggccaacatggtgaaaccacatctctactaaaaatacaaaaattagctgggcatggtggcgggcaygtgtagtcccagctactcgggaggctgaggcacgagaatcgcttgaacccaggaggcagagattgcagtgagccgagatcatgccattgcactccagcctgggcgacagagtgagagactcggtctcaaaaaaaaaaaagaaaaatgtttaacggtaatttgtggtactttttaatgtatccactaagttgtgagttgaccattttttgttaaatagaaattatttataatagggccggagcggtggctcacacctgtaatcccagcactctgggaggccaaggcgggcggatcacttgaggtcaggagtttgagaccaacctggccaacatggtgaaaccctgtctgtactaaaaatacaaaaattagccgggcatggtggcgtgcatctctagtcccagctactcaggaggctgaggcacaagaatggcatgaacccaggaagcagaggttgaagtgagccgagatcgtgctactgcactccaacctgggcgacagagactttgtctcaaaaaatgtatttgtggctgggcgcggtggctcaygcctgtaatcccagcactttgggaggccaaggcgggcagatcacaaggtcaggagatcgagaccatcctggctaacatggtgaaaccccgtctctactaaaaatacaaaaaattagccaggcatggtggtgggagcctgtagtcccagctactcgggrggctgaggcaggagaatggcatgaacctgggaggcggagcttgcagtgagccgagatcgtgtcactgcactccagcctgggtgaaagagcgagactctgtctcaaaaaaaaaaaaagtatttataatattatcaaatgatgacttttaacctccgtaggaccaaaaatgtttattccaaatgagcagtgtatcctaaagtggagtgtccttcctttatgaggggttgtttactgggagtggcacttactggtttttttttttttttttttttttttttttttgagatggggccttcctctgttgcccaggctggagtgcagtggtgcaatcgtggctcactgcaacctccacctcccgggttcaagcaattctcctgcctcagcctcctgagtaggtggtattacgggcacatgccaccacacctggctaatttttgtattttttagtagagacagggtttcaccatcttggccaagctggtctcgaactcctgacctcgtgatccacccacctcggcctcccaaagtgttgggattatagccatgagtcaccgcacccggccaggagtggccctttctaatttacagccctattaccccaccctagccatggcctgtttgcaaccccagcagcgtcawagcagcacacattatgatgggcctcgtgagtatgccgtttcctcaagttttacctcctgcaacttaaaggcagattttgcagcmactttttggtaaactgtcaactagtggcttgctgttggactgtacttctctgagtgaggtgctgtgaggacccctggaaggacacaagggcagaatagtgaaggccgacgctgacttccagaagcaatgagtgggaracrtcttcctgccacaccctgagcaacacagttgtgaagagtaaatagacactagtagcttctagactttttccgaattctcatcacrtaaaatatctccttgtgaaattctggcttattgaggacaaaraagattctggaacacaaaccccaaacagcgcatcttcggaaacatgcctgttttcaacataagaagtaatccacgcttcaggggctagcacaaagccacagttccactttgagtccttcagaagtgacaaagaccaaatgtggcccagtatgtgaggcaaggcggaagtaggaatttcatgctgttttaaggttgcttagtgtactttaactgaakrtgtaataaaagcaaattctaataaatttgttgttaataatttcctatagtgatgttacctaggttttctatagcaatgaatgtttccttgtgttttcaatgtatcttgtgaaaaattccagaggaaagctctgctatcatgagcactgatatttcatcttaagaatcctaataactagrattcctagcagcaggcaagatctttccagggctcctgatttgtcaatgtgaaaataaggactccctcccctccatctcccatgtcccactggagggttaacctgttgagttgcttatgccaacccagcaaacagggaatcatgatgtcagctgctctcaagaagctgctctatactaatctgcctgtacacttacatgttttaggttaagtgaaccaagtttgggttctataaactggtcactataagcaactgcatctgaaggtgccaacagtagtgtgagagaatcttgctttaaaaccagttgtgggtggagtaaggagtcaccatggtgtggcatttatgcgaccaggggttcaaattgagttacttctgttgcaacatttggtaagctgactcagcaatcatcgttagaaatcatgatagtttcagtgttcaaacactgtacacttggaaacataaatttacatctttgatagttttgtttgttttgagatggagtctcactcttgttgcccaggctggagggcaatggtacaacctcagctcactgcaacctctgcctcctaggttcaagcgattctcctgcctcagcctcccaagtatctgggattacaggcacccgccgccatgcccggctaattttttgtatttttagtagggatggagtttcaccatgttggccaggctggtctctaactcctgacgtcaggtggtccacccccctcagcctcccaaagtgctgggattacaggtatgagccaccatgcctggcctttggtgatttttaaacagcagttaaattccttctctaaaactctaaagttttcttttttttttttttttttttttgagatggagtcttgctctgtcatccaggctggagtgcagtggtgcgatctcggctcactgcaagctctgcctcctgggttcatgccattctcctgcctcagcctcccgagtagctgggactacaagcacctgccaccatgcccggctaattttttgtatttttagtagagatggggtttcaccgtgttagcgaggtaaagttatctttaaaatttggcacttaatagttactggtttcccatagaaaaacattagaaattaacctttgagaatttttttaaatagaaaaggatttttttattataaaatacacaatgaaatatatttcatcatctttagaattgggctgcaaatttggcacctatttattcgaaaacaaacrtggttttaagaaggggaaaattattactgtgktttagaaaaccaaaataaaatccccattaatgaaaaactcaaggaactggaaaacagtatcatgaattgagcagttttatatgatccrttttttaatgaataataagtttggccttaaaatagacattgtcttttcagatgttagccctggtttgacatcttaagtctctaacctctagcaatgcacatagaaagtgttcccccgtcctggtggtgccttttgctttacacactttgtggtgcttagttttatcatagttacatattctgcagagcccaaaagaagcccctagaaacacaaggttggtatccaggcccccctagagtccggggaggatccacactgtctgtggattgctctctgaaattgggtagatgaaccatcaaccctcattttcattttatgtcatgtttagaattgtgtgtgatagaggctgtacatacacrttttacaggaagcgcctggcactgtgtgaggctggcggttgaatggtcaggagwgtagtagcggctctaagccagcctcacagccctttctcatttctcgctccatccccctycccgttcatttccaggcctttccacgaagagtcctcagccttctccctccagccggaagagccccctgagtytgagccctgcatttcaggtgcctttgggcccagctgaacagggctcatccccactcctgagccctgtcctcagtgatgctggcggagccgggatggactgcgaggagcccagacacaaggtgggcccctcgaggctgagaagctagcagagggttgcagggtrggcctgttttcactgttccttcgggtggtgctggtggggaccctrgggcsgggcagggaagggctctgcactcacagccgccttaccagcctcctgagcagagaggaggtactgggccgccttccctagcaaaaccttcctgagactttcctcttatctctgggactccaggttccttcgtacaaaaacgagtttccttattcatttagcaaacggtccctggaacccacaggctccatgtgtcaggctggatcttccagcctcccccactcttccttccttccytcccaccttcctcatttctccctccckycctccctcctttgctcctttcttctctccctgcttggtcaagcttctactttgacaattgagtaactgggaggaaagatctgggtgctaagggagggtgcactagggactgctttgggttccggagaggctcttgggcaggaggcccagtgtagaaagatctgggtgctaagggagggtacactagggaccgctttgggttccggagaggctcttgggcgggagacccagtgtagaaagatctgggtgctaagggagggtgcactagggaccgctttgggttccggagaggctcttgggcgggagacccagtgtagaaagatctgggtgctaagggagggtacactagggaccgctttgggttccggagaggctcttgggcgggagacccagtgtagaaagatctgggtgctaagggagggtgcactaaggaccgctttgggttctggagaggctcttgggcgggagacccagtgtagaaacatctgggtgctaagggagggtgcactagggaccrctttgggttctggagaggctcttgggcgggagaccccgtgtcgatgttggagacagtggaggagccacctggggcgaggggrcggttctctgctgttgtggcacggggmggggggcacatgggccacagacaggggtgaggctttatgacaaagttgaggcagtgtcccctatgggtctctttttatcagagatgataggaataagggcacaaactgagagtctgcagggagaaagtgaccgagcagagragctcactgctggcaggcacagggcaaccaggggcagggatgctgtggcctcagggtggcctccactctcctagcccaggggagtctgcctacagctacggttttgcagatggaccctaaaagaaaagactcagggtccagggagtttgtagactatattgggcctggagtccacagagaagggagacatggggtccctgagtggcagctggatgggaagaggccatggggcctctaggagggagggagtcagtgctggtacagggggaggtatgtcattgtgacacctcagcactcctgctttggcccgaattggccagaggatattctgtccaaggcctgccttccagatgccagggctacccgtgggatgctgggactctcagcaggtaggatggcacaggcagggcagtctcctccttcctggtgccctgagggtccccctggatcccactggagtggaaggagccccctggtctggaggcagcaaaggatattaaacgtactgctgcacgaggcctgcaagtgagggctagttctgggccctggcagcaagactgtttccaaaaaagatgtctttttattttattttggaaacctaatgacaatctctytagttcactgtttctttggtacaaaaaaaaaaatggctaccaagcagtctgttattaagactaaattttaatttgtaactttttatattacaaaaatcagttgattctttagatggttctataggatgacagcttgtcacatctgaggataattgggctggtggcaagtggccctgggagaagcctgtgagtcatgacgtggcatggggccagcagcatggcaaggccctctgggatgggggcacctcagggtcctcaccgagccatgcccttgaggagttggtggctgggtcactgcagagaaagattcggcagcccttgggcccagcccctgcgtgtgggcaccctcagccctgacgtggtgtctcctgttgcctctcctcaacacctgggctctggagggagggctctgggctctgcttcaattctgtgtgtgtgagttgagatagcaaggctgttgcccagcacaggtgggctccgagatggcaaggatggccctttcatcaccatgcaggggctgctggtttgacccagaggtaggttcccaccagagtacccctctgtgctgacctcatgaaccagtgtgcccagccaggctgcaacaggttctggggagaccccggccccacattcactgacggttctgctggcaaggcctggcagaccactctcctggggagccagggtgacaggggtctgagaagcacgtgctgccactgaggccacccgtcaagcttttgcacttgcacccagttgctgggctgtgcggggaggggcaaagagctgcccaccctccagccyaccctcgccagctggtgccctcctccccagtgtctcccacttgatgcactgtttgtcccctttttaatagagatttgtgaggatcggccacagtcgaaaggtaggaaagccaaaggtggcagaagcctcttccacgctctgcatgggcacatagacccttcatgtggggacaggtggcgaagctcacaggaattgcatgctcctctgggcctatccctggccgccgtctcatccctggcctgcagcccagcttgctgggggtcaggtttgacattgatctagaggtgggggcagcgtggcagctgctgtattttctgtccctgagagtcttctcacggtattccttgggctgattgggcggggcggggcgggggcaggggcgggacggaagacccttctcttggccagtctgctcccctgactcccctgtgacccactggtggcacctgtgatgagaagtctcatcagcgactgctgtggctctctgatggcgtatgtgtctctatgtgcctcgcccctggaggagtggagctgctccgggactcgagcatcctgtttctttctatagarcaacattcagagttaggacattgcctttggactccatgccacggtgastgtggctaggaagttgtcctccctstaccagactctcccccagggcccaaggccaacagtttgtggggcattaacatgtaacatccctgtccctcagctgtgtggggaaggctggggcctcccagaccataaacatgggcctctggggacgggaccagctctgcccccagagaattcactgggcatatcaagctcaggtggagaaatgacttctttttttagagatggggtccrtctctgttgcccaggctggagtgcagtggtgcagccacagctcactgcagccttgtacttctgtgcccaagtgatcctcccaactcaggctcccaggagctgggattacaggtgtgaccacctgcttggctaaccktttttttttttaagagacagggtctcactatgttgcccaggctggtctcaaactcctggcctcragtgatcctcccatatcagcctcccaaagtgctggaattagagtcatgagccaccacatccagccaagaaaagactttgtaaagagattttactgaatttggatttgaaagatgggctcaacctttcatttgaaagataaaaaagtcatttttaatatcatgaagctcaaaaagaaaaaatagaaaaagcctaaaggctggaaaggtggttcagcttctctgtggggaggaggccagtgcaccaagaggtgggggctgagctggtggcagagccacatggtggcagggctgtgggagccaggcaggctgccagccatggggaagagctgagagaacagcagtggacgtgtgcaggactctggcgggggaggcacagcacctgggcactggagggctctaggcagcagcatctcagtagactgtagggtgctatcccttcacagctggctatatccatgggctcaggactcacaggataaatgtgcctctgttgtcctctcatccacgagggtagacaaccctgcaggctctgctaaacttcacagcagtacaaggaagaagacatggctccacatgccacctcagctacttgctcacttgcaaacccagctcctgatactcctcccaaacctccagtcatggcagctggtctttcccttggcttaggccraaaactgcggcagtcacccctcctgcctccaaccctcacaccttacctccacaccggaccttcagaatgtgtccaggatctcacccctcacccctccgcgccccccaagccagtgctgtctcgccrggtggtgctgaggtccaccggsagcctctctgccctcctggtctgctctcatcctggggcccaagtgtgtcacagcacattcaggtagaccccaaagggtccagaaggcccacgtggcctgcttccccaccaatagcctgtctattccctctgacctccccacattgctccagccccttgacctctgacctgtcccacaggctgcccggtctgctctgagtgaggctgcggcctactgtgtcccccagcctccagcccctcctctgctctgcgttatgycttgtacagccctctgtgcttcttgcctgtcttctcctggtaggacaccctcacaggggcagggggcagtgtccaggcgcctattcggagctgacacctgctccatggatatttgcacggcccacctaccctgaagctggccacagtctggaggtggggcaggcgagctgccagggcagagcaggatcatggtttctgggcagggagaggacggagaagaggctgttaagttttacctcaacagagggtggctcttggagggttcagggtggggagaggccctgcagggacaggacccagtgcctgccaaggccatcatgaggcatgtgctttgccaggaacactgtgttgggtgaggtgtagagggtcccctatggccagcttgcctgcttggcaccagcaccttgggcagagatagccctgccagctataggatsgctcagggctgggctgtctctagcagggcacggaaaactgggcccggggtatgktccacgtctgcatcaggaagtgcaccagcaagtctggcgctctgatgcaggcacacttagaatgcgcactgtttgctcattttaatgacttttgtatgggttaggtttaataatttataagcacacacacactcatggacctgtgtctgctaaccagctatgccactggcagtgatatataaaaaatgattttatcacaaaaccaataataaayttcaaccctgtttacatatggtgatatttgaacagcaattcttttttccaaaagaataacaggattatgtttttactcagggataaatctcttcagaagttgaaggtgaaaaccccatgacgatrttaccttgagcagaagaaagcaaacattaccaacttcaggctccctgagcgtgggagggtcccatgtcccagggacgcacacttacagctctctgcttctttcagcgcgtgcctgcagacgaggcctacttcatagtcaaagagattctcgctacagaacgaacatacctcaaggatttagaagttattaccgtggtacgaaagtccttgattactttgattttttttwaaaataaatctctcatctgaacacagagaaatatctcttttttttctttttttctttttttgagatggagcctcactctgtcacccaggctggagtgcggtggcatgatctcagctcactgcaacctccgccttctgggttcaagtgattcttctgcctcagcctccctagtagctaggattacaggcgcccaccaccacacccagctaatttttgtatttttagtagaggtggggtttcaccatgttggccaggctggtcccaaactcctgacctcaagtgacctgcccaccttggtcagcctcccaaagtgctgggattacaggtatgagccaccgcccagccaagaaatatctcttgataatcatgagacttgcttgtatatattttgttaaatatatctgttttaaaactattctaagtcaggtcagaacattgggtccaagtttttgtgaagctataaagctgcaaagtgtccatttgaaacttttgatgtaggatagtttcattatatttgaaaactggatggtcaacaaagaggatggctgtagtgctgatctgaaccctctttgtaggcggtgactggagggtcatcactgggtgacctatggctacaggccctcaggggcacagtttctcagtccccaacaagagccacacctcccatcacaccacactcttcccacagtggttccgcagcgcagtggtgaaggaggacgccatgcctgcgactctgatgacgctgctcttctccaacatcgatcccatctatgagttccacagaggcttcctgcgcgaggtggagcagaggctggcactctggtaacaccccttcagccccsacacgggagactcccacaccaactcatcatcaccgctcttaggaacttcccagcttcagaaactaattcagaagagccattttttcactggagcatatttttaggagcctgtggggagaggtacagatgtaataataccctttattcaccctcttccagaaaagagagtgcaaggagcaagttaaaaatggaagatccctttttgcctggttactatctgttttagagaatggccagacacataatagcagcttccatccagggcaggccctgccctgcggcctcttccacctcagagcttcaccaccttcctccagctggaaccaaggcagctgtcaccctgcgtcagattacagtgccttctgcaagctttcaccatgtttaggatgactttgtttctttttactcagggaagggccctccaaagcccacacaaaaggcagtcatcaacgaatcggggacatcctgctcaggaacatgcgccagttaaaggtaggctgcatggtgactactgcctacatgaatgctgtttatgggagcaaaaccatcttcccgaagctgaggcccgtcagaacagcgtcccctcagaaaagggtcccctcagaacaggatccccctcagagtagggtctccttagaacagggccccctcagagcaggatccctccagaccagggtccccctcagaacagtctcctcagagcagggtcccctcagaataggatcccccccagaccagggtccccctcagagcagggtctcctcaaaacaaggtttcctgagaacagggttcccctcagagtggggtttcctcaaaacagggtcccctcagagcagggtccccccagagcagggtcccctaagagcggggtctcctcagaacagggaccccctcagagcagggtccccttagtgcagggtaccctcagaacagcatcccctcagagcaggggacccctcaaaacaggggccccctcagaaaaggattttctcagaacagagtccatctcagaacaggatcctactcaaagcagggtgttccccagagcagagtcccccctaaagcagggtccctccagagcagggtccacccaaaacagggtcctctcagaacagggtcttctcagaatagcatccccctcaggctctcagaacaggattccctcagaataaagttccctcaaaacagagtccttctcagagcagcagccccctcagaacagggtctcccttkaagcatcattcccattagaacaaggttccccagaacagcatcaccctcagaacagggtctcctcagaactctatcttcctcaaacaggatcctactctggatggggtctccctcagaatcttgtttccctcagaaaagagtctggctcagggcaatgtccagggccccatcaggacactgtttccctcagaacaagttccctcctcaccgcatccctcaataagggctctccaagaataggatgcccctgaaaacagcatacccctcacaacagggtcccccagaacatggtctccctccartcagaactacccccagaacagactccaccttaaaacattgtttgccttagatcagggcccttaccagccccagaacattgttctcttcagaacctttttctccactgataatagcattcccttgaggacagtgtccccatttccatcaggacaggactcccccagaacagtgttcacctcagagcaggattctcccccagaacattgtcctcctcaatgggtcygcccagaacagcatcctcttcagaacagggcctccctcagatcagggttccccacagaacagagtcttcctcagaacatcattctcaggacagagtcccccctccccagggcaggacctgttcagggcagagtccccatagctgctgtggggagggcagggccctgggacttgtttccaccttggctgctaggctcataggtttttctttcaggtgttccagctccacgaagggcatgtagcaggggtcacaaaaatggagtagacttttggataggcaggggcagcactgggggaagtgagatttctcttcaataggagcaacggtacaggtgttcacatgtggacaacagtgcaggtygtgcattgactgttcaggggtctcactcttgcttaacgtgcctggaacagttctccctccctctcaggctgctcatgagttcaccacgtgaccgcccaaggtgtggagctctgcataacaccatgaagctgagccacagtgacgacgacgactcaagctccccctcctccatccctcgcctgtcccaccttctacccaatcctgcgagactctggccactcctcacacctagagttcccaagggactataggttttgctgttctgtgttgagatagccccacttgaagaactgcattcagcctaggtgcccttttcctgcctcgacggaagctgagtcaggttgttaatgagaaagttctacttatcccaaaggcagttgcactaatttaaaattgaaatatacacaaatctgtttgatccagattatcatactgtagtcatctttaatgttcattaaaacaaagggatttgatattaaaaccctttagctctggggagrcagccaagagctctgtccacaaaaccaaatctgggtgtcagaggccaagaccccaggttgggatcagggaccaccccctcacggggcataaggtcagttttcccccagagcccgggcccctgtccccctacagtgcaagtgtggtccctggagccccggtgtggagtggtgagtcccggagtagtgcttgtcttggaaagaggggcccttggccagccacccctcagcgacactatacaactcctggagcgcctgccaggattgaagccatgaccaggtgcaggtgggtgccaggcccgctgtgggtgggcactggtcctcagcaccactcaccactgccaggcaggccggggaccagcagactcctcagccaaccctgtcccttggcccggccctgccacagagagggaccccagcccatcatgggcatcggcagggcttggccacttccacctcccgctagaagcctagcgagtgtggatgcatagacatctgagcccagcttcctgcatccccacctggccctcaccacccctcacccccaggcagcgggccagccccgccttcactcccctyccaaccacccccccccccaccaccaccacccgtaccctcctaggggcttccagagcttttacacctggagaaacattccccactcccctttggcctccctgtaccctgaactgtgaatatttttaacccctaaatatgtaaatacggccagctcttgtgacacagaagctgttttatcaactgtcagtccccattcctttatgataggattctccacagtggtttccgactcaggctccagtggaccaaataaaagtgttttgttaaaaaaaaaaaaaatgtaaccctttagctgagcgcagtggctcatgcctgtaatcccagcactttgggaggctgaggcaggtggatcgcttgagtccaggagtttgaaaccagcctggccaacatagcaaaaccccatctctacaaaaaatacaaaaattagctgggtgtggtggtgtgcgcctgtgatcccaggtactcagggggctgaagcaggagaattacctgagaccagggaggttgaggctgcagtgagctatgatcgcaccactgcactccagcctaggtgacagagtgagaccttgtatccaaacaaacaaaaaaactttaagttagagaatagtttagtttaatatgtctgtgtaatactcagaatccacatacatgtatacatgtgttgtaaaatcatcagatatgggccaggcatagtggttcaaacctgtaatcccagcactttgggaggctgagatgggtggattgcttaagctcaggagttcgagaccagcctgggcaacatggtgagacccccatctctataaaaaatatttaaaaaatgagccgggcgtggtggcacatgcctgttcttgcggggggctaaggtgggaggatcacttgaacccgggaggcagaggttgcagtgagctaagatcccaccactgtacgccagcctgggcgacagagctagatccagtctcaaaaaaaaaaaaaaaaagtcaggtgtggttattccctctgtccagtaactgtgccagcacaaccgcttagttccactcttgagagaagtttctggagcgagccctaagactgggcaggactcrggtgggctttgtttaacccctgccctgcactcccttactgtgtcccaygcagccagctgcagccttcccatcctcaattcttcatctgtccagtggggaggtggccctggtccactcagtgcatgtgatatggggccggttagtggtgcatgtagcagtgaattggtggaatgaggtgcaggtcacatggcatctgagacgggttgagatgcattccgtggaggctagaaagcccccgctggcgcacgctgggccactggtccatttgccctgtggggatttccagccggcacctgccatcaaggaaaacaggccagtctccccctggactcctacatctcctcacctaaaggccccactcttgcgcctccacaggagtttaccagctacttccaaagacatgacgagrtcctaacagaactggaaaaggctaccaaacgctgtaagaagttggaggcagtgtacaaggagtttgagctgcagaaggtctgctacttgcctctcaacacgttcctgctgaagcccatccagcggctgctgcactaccgcctgctgctgcgccgcctrtgcggacattacagccccgggcaccatgactacgctgactgccatggtgagtgtgggtgcggccctgcatctcaaggatcagcgtgcgtggctgggaggcaggggcggctttgccagacctgaagacttccttcactgggaagcrcaggagtccaccccattagggcctggaccacagtggtcagcattggccctggccttccttcccgtctcctctggctgctggcagagggcaggtcccaggctacaccaggtctctgtctattctgctcctccaccctcaggcaaggccctgcccatctccacgtctgagcagtgtaggggatgactctgattgccctgcaggagtcacagggcatgctcctgctggggaccccacagcccccacaagtgcactggggaatggggtgcaacccccagagcaacctgctgcctatggatgtttctgtcctggaggccttggctctaaaacrtacaaaagattgggccaaggtgacctgttagaagtttttaacataggcagcctttgtaatttttgatgtttattaaagggataaaagagtaaactctgacctttttaacctaaaaataggatttctaattttattgtaaatttagtccccttttctgagatgactcaggcatgaggggaacattgctctaatggggacctattctaatggggatgtgttctgatgggaactttatgcttatcaggaggttttttgtttttgtttttgtttatgtttatggttttgtggtttttttttttgagacggagtttcattcttgtcgcccaggctggagttcagtggtgtgatcttggcttactgcaatctccacttcccgggttcaagtgattctcctgcctcagcctcccaagtagccggtattacaggcgcccgccaccacacccagctaatttttgtatttttagtagagatagggtttcaccgtgttggccaggctagtctcgaactcctgacctcgtgatccgcctgcctcaacctcccaaagtgctgggattacaggtgtgagccaccacatgaggaggtttttacaagtaaattttatcattgtcattaaaaatagatgaaaaaatacttagcatttcctctagctggtttcccatagccatgaatagatataaataaggatgctttctgattagcaagaaatagaatggatcatacaatgttgacgattctctttcttttcattctaaaagaaaatgyttcatgtttgttaaaaaggagaaggacaaaattatagaaaacattttcaaacattttaaggaaaacatgacataaccacaccatgtttaaaatgtttctcattgtcagtcattataccacagtagttaggtaggcagagtgctggagcagaggttggcctgggcccgggccaccagggaagccatgccatggagaagactggggcccaggttctggccacatctaccatgtgcttgaggtacataggactttggagggattcctgtacctcacaacatgacaggtttttcatcagtaaaatgtatagactggtgcaaaacctctgtgaagctgtttgtgaaagtgctttgaagttgtcaactcaacagaacactgataaccatcagcctccctaggtttgcttcagacctcagccatctctgaagcgcagtgagagcccagtcgatgaaacattctcagctgacactatggcaggctcctttccctccatgaccccactctscaaatgtgggacacaggaatgcttgtcaagaagggccttcttggaaaatggcctttggtgtgcaaatgttaccagcctcttggtcttcctgagaacttgaatagaattctcttggacaaaagggagtacatttgttggggctggcagaagccagccttgcaattttatttatccttcattttgatgagagtttccaagggtgctggatgttaagtgtrtgttgttgatccattctatcatgcacctgctctgcctactgctgtgggggaacctgttctgagggggacccttttctgaggggactcagttacgaggggacgtggctctcagggggtcctgttctgatggggatgcgctctgaagggatcttggacggagggggacccaattctgaggggaccctgttctaagaacactgctctgaggagattctgttctaaggggaccatggttggaggaggactctgttctaaaggggacagtgttctgaggggggactctgttttgagggaaacactactctaagagaaccttcttctgagggggacccttttttgagggggacactgttctgaggggactcagttatgagggagacactgctctcagggggtcctgttctgatggggatgcactctgaggggatcttggactgaggaggaccctgctctgagggacgggtccatactctgaggagactctattctgtggggaccctgttcttaggaggatactgtgctgtggggactctgctctcaggtggatgctgctctcaggggaccctgttctgaagagatgctgttcgcagggggatgctctgagaggaccttgttttgaggagaccctattcagagggggaccctgttctgggtgctcactaccctgagggaactcttatgtgaggggaatgttattctgggggggacactaccctgagsggatctcgttctaagtggggaatagtgtcatgggggaacatgttctgaggaggatgctgttytgaaggggaccctgttctgtgggggattctgctctgagaaggaccctgttctgaggaggattctgttctgaggggtctctgttctgacgggggtcctgttctgagggggatgttcttctgaggggaccctgttataacgggatactgttctgaggggaccctgttccgagtgggatgccgttctgaggggaccctgttctgcggggaatactgttctgagggggacgctgttgtgaggggacactattctgaggggatgctgatctgaggggaccctgttttgtggggatcctgttctgtggaaaccctgttctgagtgggatgctgttctaaggggaccctgttctacaggggatttgattctgtgaggaccgtgttctgtggggaccctgttctgagggggttgctcttcttcttttttttttttttttttttttttgtgtgagacggagtctcgctctgtcacccaggctggagtgcagtggcaggatctcggctcactgcaagctccgcctcctgggttcatgccattctcctgcctcagcctcccgagtagctgggacgacaggcgcccgacaccacgcccggctaattttttttgtatttttaatagagacggggtttcaccgtgttagccaggatggtctcgatctcctgacctcgtgatccgcccgcctcagcctcccaaagtgctgggattacaggcgtgagccaccgcgcccagccrgggttgctgttctacggagaccctattttgtggggcatcttgttcttgtgaggacgctgttctgaagggaacctgttctgtcaggatcctgttctgagaggaccatgttctgtggggacyctgttctgagggaaccctgttctgtgaggattctgctctgcagaggccctattctgagggtagtgctgttttgagggactcttttctgaggggaccttgttcttaaggggatcctgttctgagagggatgctgttttgtggggaccctgttctgaggggactgtgttctgtggggaacctcttctgtggggaccctgttctgaggggattatgttctgtggtgatcctgttctgaaggaatcctgttgtgagcaggaggctgttttgaggrgaacctgttwtgtggggaacctgttwtctgggaacactgttctgagaagaccctgtttggagggggatgccattttgaggggatcctgttctgggggggtyctgttctgtggagaccctattctgagggtagtgctgttytgaggggaccctgttctgaggggaccctgttcttagggggatcctgttctgagggggatgctgttccatgggaaccctgttctgaggggaccatgttctgtggggaacctcttctgtgggaaccctgttgtgaggggattctgttctgtggtgatcctgttatgaaggaatcctgcttggattccttgagatgctgttctcaggggaccctgttctgtggggattctgttatgtgggggatgccattctgagggrgatcctgttcagacggggatgctgttttgaggcraccctgttctgagggagattcttttctgtggggaccctgttctgaggggaccctgttttatggtgttctgtggggattctgatctgaagggaccctgttctgtggggcatctcattctgtgaggaccctgttctgtggggaacctgttctgagaggaccctgttytgaagggaatgctattctgaggagaccgtgttctgtagggattttgttctgtgtagacgctgttctgaaggtgatgctgttttgaggggactctgttctgaggggacyctgttctgaggatgctgctgctctgaggagaccctattctgtgtggattctgttctgaggggacccttttatgtgggagatgctgttctgaagggactcagttctgagggcaccctgttctgaggggacgctattctgaatgtgatgctgttctgcggggaccctgttctgagagggatcctgttctgaggggaacctcttttgagggggatgctgttctgaggggaccctattctgagggggatgctattctgagaggaccctgttctgaagggatccttttctgtggggaccctgttctgagggggctgctgctctatgtggcctctgttccaagggtgatgcagttctgaggggaccctgttgtgagggcattatgttctctggggaccctgttctgaggtggacgctgttctgtggggatcctgttctatgaggactctttttctgaggggactctgttctgtgggggattctgttctgtgggcatcctgttctgtgtggattctgttctgtgaggacccttttctaaggggaccctgttctgtggtgaccctgctctatagggaccctgttctgaggggacccttttctgagtgagatgctgttctgaaggtaccctcttctgaggggaccatgttccaagaggaccctgttctgtggcagatgctattctgtgggggccatgttctgagagggacccttttctgagggaccctgttctgcagggggcactactctgtggagaccctgttctgtgggttctgtggagaatgtcaaggcaggtcaggtgatgtataggatcattatcgtgccatcaggtccaaaatgtgtcctgagcttccagcagctgccagtccctaccsaggtgcagcacagtgtccatgtggcagtcaggctcccagccctgcaactgtgtggactcagcatttgagggcagggtggcactggtgctctttgagtggattcaagcagccatgcagcaaatggacatggcgtgatgagtctctgcctgacatgatgtctggaaggaagggctcagacccaagtgcttgagggatggccagcctgggagagccaggggatgggggcaggagcttagaaatctgcacagagcaatagggttggtagctgccaagacctatgctggcttcactgaagttmttcctcattttcagtgtcatgcaggtatcattgacagaaagtgaattttgtcagtcaattttctttgtcaatgatgatctcttcacctacttcattcttttctgactttatcctctgaaagctgtaaggggctgttgtcacccccactggaaaggatagagctgcaggccgggcgcggtggctcacgcctgtaatcctagcactttgggaggccgaggctggcagatcacgaggtcaggagatcgagaccatcctggctaacacagtgaaaccccgtctctactaaaaatacaaaaaattagccgggcgtggtggcgggtgcctgtagtcccagctactcgggaggctgaggcaggagaatggcatgaacccgggaggcggagctgagcttgcagtgagccgagatcgtgccactgcactccagcctgggcgacagagcgcagagcgagattccgtctcaaaaaaaaaaaaaaaaaaaaaaaaaaaaaagatagagctggaacagtcaggtgacttcatgctaacaaatctgcccagggctagagctgagcactgggcagtgctgggtgaggggtgtggaccttgtcatggagaagctttgtggccaggaaataagagggagtcatgatagaaacaagggagaaggtggccgggcatggtgggtcacgcttataatcccagcactttgggaggccaaggtgagtagatcatctgacgtcaggagtgggagaccagcctggccaacatggtgaaaccctgtctctactaaaaatacaaaaaattagccaggcgttgtggcgggcatctgtagtccccgctactcgggaggctgaggcacaagagttgcttgaacttgagaggcggaggtttcagtgagccaagatcgtgccactgcactccagcctgggagacagagtgagaccctgtctctaataataataataaataaataaataaataaataaataaataaataaataaaaagaaagaagggggaaagtggtccccatgagtgattccagcaaggaggatgcagaccctgtgctccaggcatcatcagagttgggagcaggctcagctatgctacgccaccactctcagcatggcctcagagctgggcagaccactcttagtataactttgtgttttaagtttcctgtccagattataaactttctcttatctttgcttgaactataagattagcatctgttcctggttaaaagagaaagttacaattgctttgaaggtgcaaatcatttagcctttaaagtacaataaatcattttcctttaagagcaaatactgccttacccataacattaaatggttatttacaaagcctatcctctttgccaaaccagaatatgggctggccaacagtttgggttgaacaacctgaaggcctcaggggtatctgcaggagcaggcgcctggtggctgcacatagtaggcagcagtcctataagtcctataaggcaggggtccccagtgcccatggctatggactagtaccagtccagtccatagcctgttaggaaccaggccacacggcaggaggtgagtggcgggcaagtgaagcttctctgtatttacagccaytccccattgcttgcattaccacctgagctcctcctcctgtcagatcagcagcaacattagattctcatgggagcacaaaccctattgtgaactgcacatgtgggggatctagtttgtatgctccttgtgagaatctaacaaatgcctgatgatctgaggtggaacagtttcatccccaaaccattcctaccacctctggtctgtggaaaaaytgtcttccatgaaacccatccctggtaccaaaaatgttggggaccgctgctataaggagtcgagtaggatgtacctctaattagaactgccttttagaatgctggttcctgtcacaaggtggtgggtggagggtgctgtgcacaccactgcctgtacacctgtactgaggggtctctccacacagacgccctgaaagccatcacagaggtgaccaccacactacagcacattctcatcyggctggagaacctgcagaagctaacggagctgcagcgggacctggtgggcatagagaacctcattgctcctggcagggtgagtgaccttgctctgggaatgttttttgagctactttggtttttcaattgagatataatttacataccacaaaagtcaccattttaaaatgtataattttggccaggcacagtggctcatacctgtaatctgaatactttgggaggctgaggtgggaggatcgcttgagcccaggagttcaagaccagactgagcaacacagggaaaccccrtttctatgaattaaaaaaaaaaaaaaaaaaaaagaattgctgggtgtggtggcgcacacctgtggtcccagctactcaggagactgagatgggaggatcgcttgagccaaggaggtcgaggctggagtaagccctgatcacagcactgcactccagcctgacaacagagcaagaccctgtctctgttaaaaatgagtaaatacagccaggcacagtggctcacgcctgtaatcccagcactttgggaggccaaggcagacagatcacctgaggttgggagttcgagaccagccagaccaacatggagaaaccctgtctctactaaaaatacaaaaaattagcagggcatggtggcacatgcctgtaatcccagctacgcaggaggctgaggcaggagaatcgcttgaacccgggaggtggaggttgcagtgaaccaagatcacgccattgcactctagcctgggtaacatgagcgaaactccgtctcaaaataaaataaataaaataaaataaaataggtacatatatacatacatacacacatacatacatacaaaaaatatataattgagtgggttttagtatcttcacaaggttatgtagccatcaatgtcgaattcagaacattttcatcaccccaaagtgaaacccccacagcaattaacagtcacttcccatcactattttgaagggaaccctgttctcaggagactctgttctgaggtaaccctgttctgggtggggatgctgttctgtggggacctcgttctgctccctaacccctggcaaccactgatctgctttctgtctctaaggagttacctgtctgggcatttcatagaaatggtatcacacattaatgtggcctcttgtgactcttctttcactcagaataatcttttcaaggttcattcatgttcctttttttttttttttttttttatttgagacagagtcttgctctgtcaccaggctggggtgcagtgccgcgatcttggctcactgcaacctccgcctcccaggttcaagtgattctcctgcctcagcctcccaagtagctgggactacaggcacataccactatgcccagctaatttttgtatttttagcagagacagggtttcaccatgttggccaggatggtctcaagctcttgaccttgtgatccacccaccttggcctcccaaagtgctgggattacacgcatgagccaccgtgcccggcctcatgttcctttttgkggctgaatcatactccatcatgcatgtatcacacgtctctccactcatctgatggacactgggttatttccacttcttggctgttacgaatagtgctgctgtggacrttcatgtacaagttttgtgtggacttatgttttcagttttgagtatataccatatacaggttcatatggtaattccatgtttaacattttgaggaactgccaaactgttttccaaagtgactgaaccatttttcattcccaccaactcgtatgagacttccagtttctcacatcatgtgtcactttttggttctagccattttagtgagtgtgtaatgctgtcttgtgtggttacaatttgtatttccctgatagctaatgatattgagcatcttttcatgtgcttattggccatttgtaggccttttttggagaaatgtctattcaaatcctttgcccaccttttattttattcagaaattgtaaagaactcttaaaacccaatagtaaaaagacaacctgttgagttttaagagttctttatatattctgaatgctagacctttatcagactatgatttgcaaacattttctcccattgtgtgggttgtcttttcactgtcttgatgtggccttcatttacaacatgaaagcttttaatttatctattttttttctttagttgcttgtgtcttagatgttatatctaagaaactattgtcagccaagtgtagcggtgcacacctatagacccagctactcgggaggctaaggtaggagcattgcttgagcccaggagttcaacgttgcagtgagctatgatcccaccactgcactttagcctggacaacagagtgagaccctgtctcagaaaaaaaggaattaatgcgagcactgccacctgcctggggcagccttagggcagggctggcgggggcgacctgtgctgctgcagtgcaagaytcagagtgccgtggcccagcacccggtagcttgtccaaatggctctggctcaacattggtggcacctactttctcaccacccagcagatgctgtgccaggacctgaaatacttcctgtactccttgtatcaggctaaccccgacaaggatgaaactgttgcctatttaatggacagagaccccacctattttgggcctgtgttgaactacctgagacgtggcaagctggtgattaacaaagaccttgtggaggaaggagtgttggaaaaagcagaattttacagtatcacttcattaataaaacttgtaaaggacaaaattagagaacaagagagcaaaacatcacaggtgcccatgaagcatgtgtaccacgtgcttcagtgtcaggaggaggaactcacacaggtggtgtccaccatgtccgacagctggaagtttgaacaactggtcagcaatggctcttcttacaactatgggaatgaagatcaggccaagttcctctatgtggtgtccaagaaacttcacaacaccccatacagtatggccagtgaacycagaaagaaggccaagattttgcaagaacaaggttcaaggatgtgagggacacagtattgacagctgaaaaaatgatttactctttcccaagatgcaatgaactaccatgtccaggaagcttggctgcgagaaggaacctgcttttgatcatttttctagagatctgggtgtgaatccttttgtgcttctgaggtgggtggtgagagacaggtccagctgtccaaggccaggtgtccccaaggggaggagcattcyggccaggtgggtactatctcttgaggggggccagagactgaggcagatgctcccagtcagcccactcaatccccgaagatcatgtaaaggacagagttcttggtactacacatagtctgtaaaagcagcctgcgcttcactggcaggaagcggccacggcctcatcggcatccagcacgccgtggcctckggtctggctgccaggccttaggctcagtcaggagtctgctctgcctcccaggtgggatcrctggttgctatcagcctcacagagctcctgacaaaggtggcttctgcatcatcactacttctgagtgccgtttcaaggccaggcctctttccgacacaggctatgatcctgcctgactcagcctgggacagtcaaggcttttcaatttgtattttccaggcgagagaactttgtaccccttttcagtgtggatagactccccagtgcttatactctggaagtgcccacaaggattgctgcattcagactgatctgttcaacccgttagcgtgaggtagcagtgttgccttgtcccccactctgtgggctcacgggggagctggtgcctgtcagtgccatgtcgctcctggcatagaggttgggctggaagcctgtctgctggcttctggagctgaaggtctggatcacagtgaaaattcgagatgtttatggagcatcacaaatgcctttctctcaccactctctcattttctttgtataactgtgcagcctttctgggatgtttgggacttcagtcgaccttcctgggctccacccaacatgacatgggagctgataggattcttttagaaaccactgcccacatgctttgaaaacagacctttctcagctggttgtagggacctgtcagagtctggggacctggggtgcagggcatgctccaagctctttgtttctggaactccagcttcccaaggggcactgtgcagactgaccaccagctgcccatgtgcaggtcagaggctctgacactgtctggtttccagtgcttctggagacttcttgcctaggcctcatcttcttctttgccaataacctgattaaccaagttctccagcattaggacttaccacctcctctttgtaaggtctcttgtatgctgttaaatgtttggcttagacaatttataaaagcctttctagagggcagacttagccatgggatgacctgtcctccccagcagagctctggaggaaggcagccactgtgggccctcagggtgtactctctggggagctgctggccccttagcattgtttgatttttgaccttgatacaatagataggcttgtgttgtgttttttttttaaatttaaagatattaagacaattcactaaaatttattctaaggggatatttatacttttatacttttttaggtatggtattttatcagcttatagttgaatgcctaagtttcccctgaaaatagcaaacaaaactgtgtatttatgaaaaaaaagaaaggaagaaagaaagaaagcctaacccagggtatgaagatttacccttctgtttcttttcttctaatagttttatgttttacctcttccatttaaatctttgatccattttgagttagtttttgtgtatagtggaaggtaggagtccaacttcattcttttgcatgtggaggtccagttttcccggcagcattgattgaactgtctgccatgtaacccttgtagaagttcaatgggggctgggcatagtggctcaagcctatagtcccagcactttgggaggccacggcagaaggatcacttgaggscaggagattgagactagcctgggcaacatactgataccttgtctctaccaaaaaaaaaaaaaaaaaaaaaaaaattcctggcatggtggcacacacctgtggtcccagctacccaggaggctgaggcaagtggatcacttgagcccaggaggtcaaggctagagtgaaccgtgatcgtaccactgcactccagcctaggcaacagagtgaaaacaaaaacaaaaaaataaatggactgtaaacatatggatttatttctggactcttgattctatcccatggtctatatgtccattgggccagttactttctgtcactagtactttttgctttgaactcaatactctcaacataaaaaattgttttaaaaattacatggagatgtttcctgtctctgcacacacatgttcattgaagcatgtgtatgaatcatgttctgtgttagccttgttagaagaaggtattgaaaatgtggaactgcaagcttggagaaatgaattagcctgtaatatacaggaaaccttccccactttgggagtctgggctttgatcaggtgctaggaccaccactctttcatttctctccttggctgcatagctttgagctgttgctgctggctgggaactcctggaagtagggctcatgttacatagtgttatttctcctagtaacctctgtgcagggtcttatagatggtggcccagggaactgtcactgggtcttatagatggtggcccagggaactgtcaatgaaaagacagttgagagtagctacataggcaaaggtgtaggctcttgagccatgcatcaaactcaggctctccacacttcccatgtggcctgggcaggctgcgccccctctctgaggcaggaggtcttgaggatgaacarggaatctatgtcagctgctcagccctgggccttgcatgaagtagatgctgtgcaaattcaaataataatttgttattattagtcaaaatctctaaagtcatgtctggatagcccagaatttcttgtcttcctgagttaaatatgtgtgtcagtcaacagacagaaaccatgccagttatttgagcagaggatgtaatagcaaggattgttaaccaggtataaagttgatgaggtgccaaagggtaaaaagaactgtgaagtgtcagggaggtggcagaactgtgagccacagttactaccctagggctggggaacaaatttgacagcttggtcaaaggcccacggtgctgagcctcacagctggcagcggggccagtgcatggtggagaaggcgccccgtgggtctgggacgcacatcctgtgagggagctctggagagggggctgctgcttagccagtgctggggtctctgagggtgatgctgctacctgtggctggaaggaacggccactcccagggccaagcaattgccagcagctcacagggacctcrgcgtgcggtctccagggctccctgtcacgcccctgtggcctctcagagtagggctaggaggcagatgtggagtgagagccacaagcttagttaccggcyccatccagttaacgcaaatgcatccatatgaccaccttcttcattgtgtggggtggacgtttctgtttgggctggtttttcatcctgcgtttctgtgaggattatctgtgtagtgtgctcctccttctgccttcacgcagtatgttgggactgctcatactaggaggcccctagcacattctccggacacctgctgctcctcctgtttgtctgaaaggaacagatggtggaagggctccagagcagtccaggttaggaatctgaggggctcccaggactctcgcttaccctatctgcgcaggtgtctgatactggcaggattcttttttcttatctaacgccctgtggtggacgaggtggtgctaatttgaatacttaggagaaccctcctttcctcctcccattctcgaacctgctcttggtgctaatttgaatactcrggagaaccctcctttcctcctcccattctcgaacctgctcctggtgctaatttgaatacttaggagaaccctcctttcctcctcccattctcgaacctgctcctgtccaatgttttcaaagctgatctcagatgacatctttgtggctgaaccttccagaagcttctcctcagcaagaacaatactccgggctctacctcttggttgtatcagggctccagggctcctagcccagagcaggtgctcagtagatggtttgagractgaatttgttggcaccaagacaggacctggtgaccaagggcactgctgagggtagaggagccccattgggaggctccactagaggaccctcattgggaggagccagaggagcacaagcggccacaaggctattcctgaccctcagcccggctagtgcatccgccagctgccctcagcccgctgaaaggggactctgtctctgtctttcaggagttcatccgtgagggctgccttcacaagctcaccaagaagggcctgcagcagaggatgttttttctggtaggttctctccccactcaagctgtgcttccccccgagggggatgggcagcagttctgttagggacatcgcctgcagcggcagcccattggcctctgggtagtttagcacttggaggctttggtccaggtgggtagcgttggagtcagacagggccaggggagggtcacagagtgggaagaagcagaaaacagcttccccacccaccccagggccagcctccttcttcattccaggttctgagcacctgactatgggacaaacagaagccaaaagattgtaaagtccacatacatgtggctgcaagaaggtgctactgatggcccaatggccagtcgggacagtttcactgttggctcagaagcccctcccagcatgtccttgttcctaccagttagtgggttccagcctgaaacatgtggatgaggaggtaactgagtcagcaccagccagaattccttactgcctccagcttctcagccaagctagctgggagctgacccagcagatgcactggttcctgtggccctttcctgcctctggtcaaaaacgaccaaatgaatgaataaaagtcccctttctgccaaaaatctccagcaagctgcacagatctgatgtccacatgatgagcagccagagtccaagttggtctgactattaagacacttgtttgtgaagttcatggatgtaaagcttgctgcttctcagttctcagatatgttgctgtacacaagcaaaggagttgcagggaccagccacttccggatccggggcctccttcccctccaaggcatgctggtgagtggtcttgcaccctgcctgggatttccacgtggtgctgggctgggccccacctacctctctcctgcagaggcgaatccttacccagcaacactgagagcagcacctgctgagtatttggccgcactgggagcagcacctgctgggcatttcttgttggttgwttctgaccctcatggtcattgttgttattgatgctcaaactgccctgtctctagtccatggttcccttctagggaaacctggactcagcctgtggtctctgtcagcacctggcaggacaaggcctgctccccgcaagcttagagtcagcctctgcagcagcatcttcctcaggctgtgccacctgtgtgacatccaygccagccctctgtcccatgtaggcacatgcctgggatgggaagagaaattcctcattttagcatgatccagttcatcaactttgtcctttgtggttagtgctttttgtgttcaatagaaatactgttctcaggtcatggggagactttcatgcagctctagaggctatgtccacttgccctgagcgtgtccctgcactaggcctagaacggtacagacaggtagccaagtccaggacttgccataaggatgtgccattcgtccaggacaccacgtcacagtgactgtctctccccatgggcctgccagggcgccaaggacaggggctctaatccccagctctgccctatccctcttggcttatttgccttgactacagtgctacagtggtcctcactccctccttgtggtcctccctgtcagtgatcttctctccttgagatcctcccttcttgtaatcttccctccctggggtcctccctccctccccaaggtccttcctcactccctgtggtcttccctctctggtgtctttcctccctgtagtcctccctccctgggatcctcctttcctaggatcttccctccctagagtcctccctccctccctgggatcttcccttcctgggatcttccctcattccctgggatcttcccttcctaggatcttccctccctctctggcatcttccctccctgtggtcctccctccctgggatcctcctttcctaggatcttcccttcctagagtcctccctccctccctgggatcttccctccatcggcttctccctccctccctgaggtcctccctcactccctgtgatctccccttcctgggatcttccctccctggggtcctccttccctaggatcttcccttcctggagtcctcccttgctccctgtagtcctctctccctgggatattccctccctggagtcctccctccctgaggtcctccctcactccctgtgatcttcccttcctgggatctccctccctggggtcctccttccctaggatcttcccttcctggggtcctcctttgctccctgtggtcctccctccctgggattttccctccccatggtcttcctcccccagggccctcccccagtagggtcctccttccctgagatcctctctccctggggtcctccctccctggagtccttcctcccccagtggggtcctccctccctggggtcctctttccctgttctttcttcaagggtcttatccctctgcactgcctcctcctgacaatgagcgccaaaaccctcaggcaggtgtttgtaaaatttaattccacttctcaggccctcagcaagaagaggtcagtttgaattagctcatctgccaccaccggaagcagaccccatttgttttaaagtatacttttaaaaattacacctttattatagaaaaaaataattgaaagtataagacagaaatcactcatcactggccagktgctgtggctcacgcctgtaatgccagcactttaggaggtcaagatggtaggatcgcttgaagctgagagtttgagacctgcctggggaacatggcgaagccaaatctccaaaaatcttttttttttttttttttttttaattagctgagcaaaagtggtgtgtgcctgtagtcccagctacttgggaggctgagatgggagaatcacttaagcccaggaggtcaaggctgtagtgagccgtgatcgtaccactgcactccagccccagtgacagagtgagacctcgtctcaaaaaaaaaaaaaaaaaaaaaaaaaacacagagaaaagaaacaagaaaaagaactctatcatcgtacccactcagcagtgatggctgcaggcatctgctgcatggttgccatcacccacgggctgttttgtcaggacactggttttcctttcctttcatggcagccccagttcacttaactagtcacctgtcactggacgcttggctgtggctggttgttgaggactgtaacattgttggatctctgtctttctgcacatccttaattatgtccttcagatcaattccaaaatgtagatttgtctgagcaaaggtgtttacggccttgggcactcctgctaaattgctgttggagcacctgcgccagctgaccttcccacctgcaggagctaggtctaaacatgcatctttccctccaccatggaaagtgctaggcacctgtctctcttactcttcccaagtgggtaaggtaagcagccccatcgagcagccccatcatttcactttgcatccctgcggactrtcggtgaggccagcctggccygtgtcctggcattccatgcttttcctctcaggaatcactcagcgtgctggtcactctggtctccattggtctgtgagttttttgtacacattagtgaaatgtttatatgataatgctcaccaacactattaagtcacaaattattttctcagtaactgctttttactttgcctacaatttagttttaccttgtagaatttaaactccatcttgatgggttctgtttctcttactctagaatggcatctggcacatatagggaacccagcaaatgcttgttgaaggtgtgaattgaaacagacactcctcaacttatgatggggctatgccctgataaacccattgtaagaggaaaatagtatagtcaaaaatgcatttaacagggcacggtggctcacgtctgtaatcccagcactttgggaggctgaggtgggtgaatcacctaaggtcaggagtttaagaccagcctggccaacagggcgaaaccctgtctctactaaaaatacaaaaattagccaggcgtggtggtgggcacctgtagtcccaactactcgggaggctaagcacaagaatcacttgaacctgggaggcggaggttgcactgagccgagatcacaccactgcannnnnnnnnnnnnnnnnnnnnnnnnnnnnnnnnnnnnnnnnnnnnnnnnnnnnnnnnnnnnnnnnnnnnnnnnnnnnnnnnnnnnnnnnnnnnnnnnnnnnnnnnnnnnnnnnnnnnnnnnnnnnnnnnnnnnnnnnnnnnnnnnnnnnnnnnnnnnnnnnnnnnnnnnnnnnnnnnnnnnnatggaatcgctctgtcgcccaggctggagtgcagtggtgccatcttggctctctgcaagctccacctcccgggttcacgccattctcctacctcagcttcctgagtagctgggactacaggcgcccgccaccacgcctggctaattttttgtattttttagtagagacggggtttcaccgtgttaggcaggatggtctcgatctcctgacctcgtgatccacccgcctcggcctcccaaagtgctgggattacaggcgtgagccagcctagcctactctaaatgtgctcagaacatacattagcttacagttgggcaaaatcatctaatatgaagcctattttataacaaagtgttgaatatctcacataatttgttgaataccaaactggaagtgaaaaacagaatggtcgtatgggcacttgaagttccgtttctactgaatgcttatcactttcacaccatcataaagttgaaaaatcagggcctatcagggtcagctctggctgtcttttccttgagggtttctatccttagtatgggctcaggaagttcttccccatgccaatattatattggcaccttttaatggtttcagttttctcatttaattaatctccctagaatttgtttttttacttttttggtttttttttttttttttttagatggagtcttgctctgtgtcccaggctggagtgcccaggcacgatctcggctcactgcaaactccgcctcctgggttcacaccattctcctgcctcagcctcccaagtagctgggactacaggtggctaattttttgtatttttagtagagacggggtttcaccgtgttagccaggatggtctcgatctcctgaccttgtgatccgcccgcctcggcctcccaaagtgctgggattacaggtgtgagccaccgtgcctggcctagaatttgttttgatagatattagattgagatgtaacatttctccccattatttgttgaatccttcattttctcactgatctcagactttatcaaatggaagcctgtgtctttgcactcgagttctttctgggcattctgctccattcctgtctgtccagcatcagtccactctctctcattagtggtgtcatatgagatagtcactgtttggtgaacacattccatcccttattctgcctccttttaaaaaagattctttgctattctcaagcatttaattcttccaagtaatcttctaagtcattggacaaattccttacaaaaacaccatggagatttcagttgaaattgcattaaatttttgtgttaacttacgggaagactaacatctggacratgttttgcctgcccttgcttatgttgattcagatttttgatgtccagtgagaggcttggttggtgtatcagsctctgcacagggaagctgtccattctgtggagttgttggtaactggctggtcctggggacagagaactggccctcgttcctgactgttaagggaaggatgatggctcttggcttgaaaagatcatctttatcaygttaacacagtttccttctgtttctaagaggtattatcagaaataacaccttggattttggcaaaggcattttcagcatgtagagaatkgatttccctttttctctttgacttctgataggatgaatgttatcaatcagctttctaatgccgaacgatccttgcattccccaaacaaccttacttgatcrtgggacaattccttgttacatgcttttagattagatttggtaatattttattttgcaattatttcatctaactacttaaaattaaaattaatccacagtgggttttctttgaatctagctctgttaggttttggtctttggttcataaatgaattgtccaaytcccttttggataatcaaaatgctcaacattttttcctttgcttgattttcagctaatagtgctggaccccccggtgagtatttgggtgccctctggcccatggctcaccccctggggtgcagctgccatggcgcagggataccagtgtcctccttggcctcktgtagagtctgtgtgcacttggacagcactgggcttccaagccccacctagcattgccagcagtcaccttgtgtcctgctcaggcttaggctgtcagttccttcttggccacaagacttggaccgtttctcccacccacaggtggaagaaagtgataacgagtggtctgwtccacactgtttcaccatctaygcggctcagaaaacaatcgtggtggcagccaggtaagggtcttccatgtctccatcctgagcagccctggatggaggggtggggacttcctcgccatgagcctctgagtcctctgagctgtgaggagccatgtagcctcatggggttgtgccccctttgactctgagctctgcttccaagtcacacaaccaaaggagcagcctcgcccttgtcaggggcagggctgcttgccaacctgacaacaccccacaagtggcaggccccagtgctgtggagccgctccctctgccctccggttcacagtgcctccaaagacaggacgggtgagtgggcaggctcctgtggtctcccagggcacaggcgcttccccaaccctcacgtcaagaagtgccagcagctagtggtcaaagccccaacagggcagcttacacccagcccagccaaacactgcctcccagtcccagtgtggtatagactcacatgaggcagcccaggctatggcacagaatcaagtggaaacagctccctcctccccagataagatcaacagaaggatgacactgagctcatttggcggccaggatgcaggggcccctgcatggtcaccagcaccacactgtgctctgtgaggagtctcagctctgactctgcagcgccctggccagcatcagagcacagggcactcagttcccaccaggaaatgctcacttaatcatgaaccagggccaatcttgcatttcagyatcacagatgtagagaacatcatttcaggaacaaatacccctgcagaccccctgttctaggaccggggccctgccctggcacccacaaccctgtcacagcaccctggaggtcaggctgatgcaggtccctcccagctctcctccctgctattctcgctggaggggacacgtttcccagtcctctcaccaggcaggacaaagcagaatgtgagagaacaggtgccctgacggctcgccctcccttgagggctggggccctacacaaggaagagcagagccactgagccttgcccttctccctgcagcactcggctggagaaagagmagtggatgctggacctgaactccgcgatccaagcagccaagagtggcggtgacacggcccctgcactgccaggccgcactgtgtgcactcgtccccccagtgagtgctggccacaaccccccaggagacctccactacacctaaggaggctttttttggaaactgttttccttggtccccattggcccgctaagttcccacacaatccccttccacaaggaatgttccaggctacgcctcatgcctgggcgggaagaggtgtcaatcagctgctctggcagaagcacctgtagttttgctctcagccagcagctggcctagcaccaagggctccccatttccccaggacccccgagaggaacccaaggggtggaagtatttggcaagcagaggccacagggggttccccctgagacgctgctgacttctccccaggatcccccaacgaggtatctctggagcaggagtcagaagatgatgctcggggtgtccgcagctccctggaggggcatggccagcaccgggccaacaccacaatgcacgtgtgctggtaccggaacaccagcgtgtccagggcagaccacagtgcagctgtcgaggtacgaccgcatgagcaccacctcagtgcatctggaatgytcccagctgtctctgcacttggctgctgaggaggggacctcaggagggtaccagcaggcaggcttggccccagaggactgcctcttactctccccttggtagaagttggtatggaaagtgcccctcatccagtcaagccctctttgaaaagggtgtttcaggtctggtgtctgatgaagtccagcaggcggggcgtgtcctcagggcctggagctggtgtgtagtggagctgagaaaagccttcccagacacatcccctgcagccccccgtcccagtgcctccaaaacccttcacctcgggcttggagctcgaggctctgcccaggcaccctgccatagaaggttgtcagctctatctcactgcatgggcccggtctgccattgtgggtcaccaggttcctcagcctggtgcccccacacccttccccaagcctgctgtcttactccaccsagagctcttgtcttttttgctgtctccccataattcaccccagccacaatcggctgggcaggggctcaggagctaccccagcacccccgtgagggggctgagcccgagcctctcccctgatgaccctgggtaggtcagggtgcagcaggtccctgacctgggcccaccagcttatggccagtccaggacacctgagatctaagcagggtcctagctaggcccgctccgccatcttagagtgcaacccctgaataccaccctgaaggcgggaggctcatgtgagccccatgagcccagccactccagcgccaaagccatgcctaatcctggcagaacagatgccacatgcttagggacagggctgcagtggggcatcttgtgtgtgcctttacttgcctctcccccacccatcattttaaagaaccttccagacttggctcaatgtactgtctcttaaggtatcttctctcttctggctgttggatgggtttgtggatggttggttactgaacactgactttattgtgcacagggaaagggaactcactttacttggygcctggaatgtcactctaggtttttaacatgcttctgttggacttaagtactgataaagctgctgttcatagcagtccagaggtaaaaccaaggcctcagctggagaaagcatgcagaggcttagtcttggggagcaaacccactcccacaaggggtcctgggtgctggttaatgcacctgcatttttcctttattgacagaaccagctttcaggatatctgctaagaaagttcaaaaacagtcatggctggcagaagctctgggtcgtctttaccaacttctgtttgttcttctacaaaactcatcaggtactggagtttcactggagcccaatgcaggtgatgctagcagacagacacttaaccctgctcacctgtgtcccttttgtattttggttctgccctcccatgctttgcccacacaccctgtgctgtgtgaacagggaaactggctcccttggcccgtgggcatttgtacgtgccaccgttgtgcaggtagcagaggaatgggcattccctgtggcaacccagcccctggaacccgtgtccctatgctgtcttscaggatgactacccactggccagcctcccgctgctgggctacagcgtgagcatccccagggaggccgatggcatacacaaagactatgttttcaagctccagttcaaatcccacgtctacttcttccgggctgagagcaagtacacatttgaaaggtaattttgcaggaggcagccctggtcagctgcccatttcgatgtccgctcagctcccatttctactcatggtggtggaggcaagttttctgggccctggaaaggaagggctgagcaatgcttccagcatttccaaaaaacagcaatgctttgttttttttttttttggagatggcgtctccctctgtcactcaggctggagtgcagtgatacaatcttggctcactataacctgcacctccagggttcaagcgattcttctgcctcagcctcctgagtaactgagattacaggcatgcacgccacgccgcctggctaatttttgtatttttagtagagacagggtttcaccatgttggccaggctggtctcgaactcctgacctcaagtgatccatctgcctcagcctcccaaagtgctgggattataggcatgagccaccgcacccggccccaggtttttaacccttcttttgtcctgcttgtcccrtatcctgggttgttcttgggacagtgtctgagcacaagatggctcactggtctgatggccgccctctcctccaggtggatggaggtgatccagggggccagcagctcagccgggagggccccaagcatcgtgcaggatggcccccaaccctcctcagggctggaggggatggtcagggggaaggaggaatgacgctcaacctgcccaggtttggacacaactacaaagaacagcaggacacagaggtgacctctgtcctgaggcttctcaacagatgggaagtggctgtggtctcactggatccccactggcaccagcagtgtgggtgggcctcatgtaacatctgggaggggcttcatccccccacccaggacctagtgcatgccagcagctatctggggccctgggaaaaatgtgcgagtcttgagcgcggagccgctcaagccacagctcccaggcccctggctcaaagacgcagacaaggcctgagcagtgctctcggcatcggaccaaagcctgggcacaccctgcctctctccccagagcagggtccctgccgaggactggcctagagcaagcactggaaaagaggccctgccatacaccctgcgtacccactgccaggaccctctcagacaagcgtggcacagccatgctgaccttccatctggtgaaccaagtggcagccccaggggcctgccctgcaggtcacagctaaacaagtctggcagaagccacgcttgttccccatgtacctctagagaagcagaaaccaaagtccccctgtgccctgggagggtggggccgtctaatttattactgcccagcattccttccaacgggaagtagatgggcgactgctttgttcacacacatttgattaaaaataaacaaacagcatctccccacctgcattctcctctgcctgctctgttcttccggtgggccaagcagagcccaggaatccgtcacagggaagtttcgaaggggggctgggctgccgtctctgcgtgctgtgatgaggactcgggaccagggacgctgcagccccgcatggcccgggccccaccacacacacctgcatgtctccaagtcaggtctttattgaaagtggcaggggcctctcaatgttctatgaaaactaacatattaacctcagaatatttcaggaaacaagtaattcaattttcttaaaaaacaaaacattctggatgacacaagtacttatgagcagacacagtacctgatccaacrccacaaggcaaatctatggccatcatgggccccgggaggacagcggccaggacactcctctgggggctgccctgttgcctctccccacctcatgggaggaggaggcagagctgccctgatagttgctctgcgccttggtctgagcggccatagggctgcatgagtctgcagaagacccaggcgtagctcatgagggccacgccggcggctggagcccccgtgagcaatactgctgggccaggagagggaggagggcagtgggcatagagaacagcgtccctgacgtgcacaacagcacactgcaggggtggaaggagacggtgacctggtgacctggcatgtgaggcccacgggatccgacgtgtccctgcaggcacgacatagcacagggcaccttccaagtcagcacagttcttatggagctcagaacaaaaacaaacgaccttccgtcccctatctgaacagcagtgcgcttcagcgggtggatgtcaggtggtttctgttgtgtgaaaacctgcagagagaagagcccactgctgcgtgcgtgcacctctgtgcccaggctcctgacggcctcttgggtgtgcagtctgcggtggcagccctgacaagccaccgcaccacgtgggtctgaaggtgtccccaatgcacagggtctcaggagcagcaatgactggcccagaccccacccccagagctgctgcccaggggcgccgggaaggggtccctgtgtgtggaccaggacttggcgcatctgccrgcggcatggcggttggaccctaagtccgttgggcggtggagggcccagcatctgtcctgccctgtctctttgctaaggactcgagtcagcacaggggcagctctgacgttttgccaccagcgtgtcagagtagctcccgggagccaccaggtggaggggcagaggccagctgaggacagccatgtggccactgaggccgggaccctgagacactgcctcagacccttagactggaaaggccctgcccactctctccagccccaaagtctccatggccctgtgagctgggtccaaacaaggaagaggatgccacgccgcgccttcccagagtgaagcgagcccatgtagtgccaaatgcagccacacccacgagtgagcactggrcctcaccccacgtccagcttcttggtgggggtgctctccccgaccctatggcacggccgccctcacctctgcactcgctccaccaggtgcaccatcagcttgtctgagatgccggggcaggactcctcggccaggctgaaggcgttctccagctcctccagcgcacccacgctcccgccgctctgcttgtgcttctctttgagctgtgaaaagaccaccacgcctgaccctggaccccaggacaggccttcagggagcctgctcctttgctcggccacagtgatgccggaggccttcagggctctcgcctaggagccacacccgggagcccttcagcaagccgggaagtgaggtggcccaaggaagcctctgcccctgccctgccaacggggaccctagtggtccttccccacagcacctaccttccccctacactccggggaatctcggacctcggttctcaggaggggaccagatggcttcctcccagccgagggtcatggaagccactcaatgggtctaatcagacccaaaaacacgaagcccagaaacccccaaagcacacggcaccgccaggcccagatctgacctccatcaggacaccagcatctgagcctcctgtcaccgggtgtcacccaccctcggggggctgtggctggatcagcaggctgcccaggacctggacccgagtggctgcttcccgctggggcctccacatgggctggggccaacgtccctcgaccgtgctcctccctttgccgtcctcaggcaggccctgccttcaccacctctcacccacatcctccatcctccctccccaggctccaggtggggctcctggagggcacacctgggcccaagcccgctggccacgccctgggcacacagatcctggctgtatcacatttctgaggacggtgctgactgcccatcagcaggtgacgttgatgcagggtcacgtgactaaccagggcggcacctgcccggggatggaccccgactaaaccttctctgctttctctatagaaggatcatctgtgtttgcacctgaagaaaaaaaagtcaccctaggaacccagagaaccttggcaggtctgggagtacaaaaggagtcattgcagcagattctgctccttccactcagaaaacccagcccacaatcagctgcaggaaagctagaagctgaaaccaccccacagtgctgtgagggagacatctccgtgcaacagtgtcacagccttgtccttgacgggactccaggcccagtcccagccccatcctcacctctccgaagacgggccggaccagcgtggacaggcactgggacctcggctgcctcttgacgggctccgcaggctgcaaaggagtggaggcccagggtgagcagggcagtgcaggtgacaggcagggcactcccatccctgcccaggctctagccttgaagagacagaggctgggagcagcctgtcggggcacatgtccagggccggccccaaaaccatcaagccacccggatggcctgactctgagggcgactcccaccctctcctgactctgagggcctgtgactcccaccctctcctgactctgagggcctgtgactcccaccctctcctgactctgagggcttgtgactcccaccctctcctgactctgagggcctgtgactcccaccctctcctcacaaatttggctccaaacaggccctcatcttcccggcacatgctggggctcggggtctccacaccaggcctagtgccacagtgggcttcagaccacccctgcctttcccaagctccttgtccaagctccagacactgggtggacaaagctgggtcccgcatccagcccatcccacggccccaggggtgcacagagggcaaaggccaggccaggaacagaccttctgtgaactgtgcagggccgtccccttgtgaagcttgctgtgtggactcggccggatggtaggggggaacgtccagatggggccctgctccccgtcctccgcctcgccatcactgaagaggatgaggagttgccagggccagtggggagagggccaggaggcatgagggcctcagggcacacctcacggccaagggaaacccgaggtaccagacggggctctgccaggccacggggtccagctgatgcctcagcaggccctgtcctgcagccttgagggggtccctgcccaacactatatctggtcaccctcacccccagggcccacgcccctgcttctggagtggggaccacccaygtcacagcacctagggtcaccatgaggataaaccaggtccctacatgtcagagtcctcagagctggactcctcgccatgcccctctgacttccagcgcttatagcggtcgatgagctccgtgaggaaggaggtcttcttggtgtagcgtgtgatgaacttgtgcttcaggagctccttggccgtgggccgctgcagggggtcaggggaacactagtcactgggcccagccaagctctgcctaagggaagcaaacgtgaggcagcctggaccggggcgggccctcacagctacaaggctggtgggcctgggcctccgggctgtgccgcccaccccaagcgaacgccctccctccacgtcctgtctagaagggaccgggccagaggcgggccttacgaatcgggggtctttgttgaggcaggcctccacgaactccttgaagggcttgctgtgctggccctccagtgtgggtgggctgttcttgggaatcaggaacaggacgcgcatggggtggaggtcagagtttggaggctcccccttggccagctcgatggctgtgatccccagggaccagatgtcagcctggacagaacacaaggactgttgctgccctgagcacccgagccaggcatggtgcccgcacctgcccgcccgctgcacccaccttgaagtcgtaggccgactgcttgatgacctcaggtgccatccagaagggggtgcccacgaatgtgttcctcttaatctgcgtgtctgtgagctgccctgctaccccaaagtccgccagcttcacgtcaccctgctccgagagtagcacgttggcagctgcttgacacaggacaggcaggcgtcatcccaggctccacgtggctccaccccgggccccctgagaagggccagggtaccatccacctggcctcctagggcacagcagggctgtcctcaggacctcagccctccttgccactctcaaacccagggccacctagggccacaggggcactgccagcaggagcccaacggctccactccgagctccagggctcttcctgcatttggcttttacgacaaatcccaacgacaagcgacttcgcccactgggggctaccgcagaggtgaccctgaccaagggtgtagccaacacgggcctgccaggaagccccctgctccaccagaatcgtcccctacatgacagagatggctcgttgccagtggcaagtccctccccatgggctggcccagcctcccgtctgctctcagcagggccagaccacacgctggggctactcaattctacacctgctgctgtgccgtgcaccacagggaaccaacaactccagccaagtgtggccctttcctacactcagtccacagctggtttcctcagcgtacaaggaaaccgttacaagtagtatcttctggaaagggagcgagacaggactgctcagtttcagggtggccacaaggttctctatactccagaccctgggcaccactagccacttgcccctcacaggccccggcctctctaaggtcagtggggctcaggacgttacaagagccacatccacccccagcaggacctttgatrtctcggtggatcttgcgttcggagtgcagataatccagscccttcagaatctcccgcaggatcgtggcaatgtatgtctcctccaggggacctggtttaagctggagaggaaggtgcgacagcagggcctcagctcctgtcccaggcccaatgcctgagttctctgcctctctcacagggaagggctgtccctgcagatagctgggggcttcgtgttcctttacttcccaaacagaactaagtttcagatgggagtggggtggtggaggctctttctaaagcatataaaccagcctcaccttactgtcatgtaacagaaaaataggctcccagccatctcccagcaggcctgcccccgcccactcccacaggccaggacccctttcagcaccaactgggcagacgtgcagatggcagttcatttttgctttagacgattcctaattaacacctaacgtgccatgacaccaaacgagaggtggcccctggagcccatgagtctgaggggcaggggactcggacactgcatgaccccccactgccatggcctatgcctcaccaagtccagtgctgagccgccgcccaggtactccatgatgatccatagcttggtgctctgggaccggagacaaacccatcagcatttggcagcaagaggaaggg

SEQ ID NO: 8788 - DNA, 27144 bp, Homo sapiens
cttggattgatgtttgcataggggctataaggagaatgtatacctgacgtcacaaaaataactgacatcagcatattggggcgggagtaggggtggggagctgcaggagtctctttcccgtaaagaacgtacatggctcgagttgggggctgactgcctcagccagatagagccctgttggttctcaggaaaataatcttcctagagcactacttagaaattattccttctctctaaagctgacaagatcagggagatcggccctgccaggatctcttgaggagagaacttagcaagcccagtgaggtggctgtcacagggaagcagtgttcccacctgtcccccatgtggccaggccaccaaggccccttagagagcactgcccactagtgtgcctgaaatgggctatagatcctctcctcccccaagcaggcaccaggtcccagggcgaccaatgccagcaaggccctgccagcctcagtcagcctggtccatgtgccccagggggttgcccatgtagtctgtgtggcatcatgtgaacaagttgggaagtactggcctcagaggactgtttgctgacctctgacctcagggcaagaggtcaaaggagcaggaatcttacaaaatgggtacaagggcacctcgtgggccacccaggaaccaggccacaccaaaggctgcactgaaagtacacagccatgcaaggggactggcagctctctcccaagagaaaaatcacctgctagcaccaagctgccatcagagcagaggctcagccatgaaactaagccaacagagaagggtcagaaaagccttgcaggccagccaaccgggagagcattcctgcttcaggaggagggagggtagaacacaaccccagcagcccttgttgctggttggcacagctgtcactgatgatggggtactgctcttacccaattttacagaggaggaaactcaggccctgggaggttgagtaatttgcctagggacatacaagagcatttcagagctgaatctgaatcgagggctgggctgatcaccaacactgcagcctcccaacaagtttgcagaggggaagggcagttcagcacttcagtagcatgaatattacaaaaaaaaaatcagggcaggcgcagtggctcatgcctgtaatcccagcactttgggaggctgaggagggaggggtcatttgacaccaggagttctagaccagcctagacaacatggtgagaccttgtctttacgaaagaataaaaaatttcaggaggcatggtggcatgtgcttgtagtcccagctactcgggaagctgaggtgggtggattccttgagaccaggaattcaaggccgtagtatgatctgatggcacctgtgaagagctgctgcactccagcctgggcaccagaacaatactgtttcagacaaaaacaaaagaaaccagaaaaatcagcatgtactactgtgagaacataggtgaacaattcttgtccaagaaaaagtcaaatgtgaatcacagctgagccacccacatcacgatggctgagtgaatctgtgtctgatttagccacagttcagctctcttgtagaggcagaaagcagagcggttgaagtgtgtgtaggctttctattcttatgtcccaggttcaaatcctgggtctttattttccttagtgactgcgagtccaggcctcagtttcctaatctgtgaaacagggatcataacagcacctgcctcaagggttgttgtgagcaatatatgaagcaatcattataaggcattgagcacagagcctgagagtatgagcccgtaaactcactgtgagtttcagctgttaactcaaagcagctttttgttgccaagtcgctggctaaagatgcccaagggctatggtctagagagaagcacctgaacccacctaagcagttgggttgggggatcccgcctggctgctccgccagctcttgtcctgcagaggcccccacttcgcaggtcagatgtgtggttcacctcctgtccagccttcccaggcctgcgcaggagcctaccacctgctcactggtttgtaagtcattcaggggctgggcgcttatagagtcactcaaggcggtgactcacacctataatcccagcactctgggaggccgaggcaggtggttcacttgaagtcaggagtttgagaccagcctggccaacgtagcaaatgaaaacccgtctctactaaaaatacaaaaaattagctgggcgtggtagcacatgcctctaatcccagctactcggggaggctgaggcagaggctgcagtgagctgagaccgcaccactgcactccagcctgggtgacaagagtgacactgtctcaaaaaaaaaaaaagtcactggactcccccaagccagtcccctacatttcacatcaggagggtcacctatggtgcctcctgcgtcgggctgtggtgggttcccacacgaacccccatatctctactccccatggtagtcagaggagcctttaaaaagggtaaatttgccgggcacggtggctcacgcctgtaatcccagcacctctggagggggaggcaggaggattgcttgaggccagtctgggcaacagagtgagagcccatcttttaaattaaatttaaaaatataaaaataaaatggctgggcgcggtggctcacgcctgtaatcccagcactttgggaggctgaggcaggtggactgactgaggtcaggagttcgagaccagtctggccaacatggtgaaaccctgtctctactaaaaatacaaaaaaattagccgggtgtggtggtgtgtgcctgtaatcccagctactcgggaggctgaggcaggggaattgcttgagccagggaggtggaggttgcagtgagccgagattgcgccactgcactccagcctggacgacagagcaagactccatctctaaataaataaataaataatttttattaaagggtaaatcagtcaaatttccaaaagaattttgagaatccagagcccattgctctgataattaaattcaacatctggacccagcttggcaagtgctctgtgatccagcccgttacctacctctcatctcatctctcggccatgctccaagaagtgtctgctccccaagtgcataagctcatgcccccaggcccatgtccttgcctctccctctgcctgggacactcttcctccagatctttacacttttgcctcttttttcagcctcagctcaaacatcacctcctcccagaggtcttccctgaccaccccagggatagcagccctcccgcttccccaggcactcccacattaccttctttatcattttcttccagagctcttaggatgatctgaacttctctcataaactggcttattcacctgtgaactgcctgcttccctcgctataactgaagcactggaagaggtcctgcacccagcaggcactcaatgagtatctgaggaatgagtgaatgaaatgcccagtgcacaatcaacctccacaaaagcagtttttcttttcacatatcacagcccctctccttgctcacccgcctcgctgaggggctcctgagaacctccgtagaggtctccatcagccaaaaagcatctgcaccatcagagagggcccctcactgccgctcgcagtgctccctgctgccacgtgcagccccttgagcatgagcctgttgacacaggttggcacacggtgtctggcttctgtaaatgctctctgctcccaggtgtgccgtgccccattgaaggacagcactcacactcctccaggtattaactgactttttccccagcaatgtttgttttagggattaaagtttgtggaggagcctataatttccagactcatctgttcctttcctggcagccagcacatttgtcattctatttttcccaagtccctgataataccgttccagacatgttgatttgatggcatcagtcaacggaaagactctctggggcctgccgtaggccagaggacaggctctccgggccacactcaggggcgactgagccaactcttcacgccattcctttccttccctgcctaggacgaccttacagcccatgatcgcttttcttcttcttcttctttttgttttttcttcctgttttctttttaagtactacagtgaccccttatttattcagcaaagaaatggactactccacagtagtgaattttcaaaataatgcccttcaagcactaaaactttaaacaacacatcttcaaaacagctttgctgaggtataactgacacactataaacggcatggatttaaagtgtacaacttgatatgttttgatatatggacacacccatgaaaccatcaccacaatcaagataatgaacatgtccatcattcccaaaagtttcctcccgcccctccctgcccccttccccaagcaagcactgatctgttttccaaatacgtctttaatgctacaagggctcacacacctccccaccttagaaaatggagtatgatcaacatgattgatcctttccttgattcagcattatcaccaacacgatggaaagtgatctcagatgtcatgaggatgcatgattgtttgccctgatcactaaacggcccattgttgtgctggcatactgggcagtttcaagtttgggagttttctccctcactgctagctgtctcagagcttagttcccagcagacaactcttgctgcctcgaaccctggcacactaaccaccatcctgtgacgttcccactcctcattctgcgacagtggttctttgctgggagagatttttgtctcccaagggacatttggcaatacctggagatctttttggttgtcatcatgggagcgggaatgctactagcagctaatgtttagtgactagggatgcgactgaacatcctgcaatgtagagtgcagtgtcccctacagagaattatccgacccaagatgttgataatgccaaggttgagaaaccctgttcaggatgacaaactgattgaaaactcaacaaggggaccgggcgtggtggctcacgcctaataatcccagcacttagggaggccgaggtgggtgtatcacttaaggtcaggagtgcgagaccagcctggccaacatggcaaaaccccatctctactaaaaatacaaaaaaaaaaaaaaaaaatacgagtggcgtaagcctgtaatcccagctacttgggaggctgaagcatgagaatcgcctgaacccagaaggcagaggttgcagtgagctgtgatcaggccattgcattccagcctgggcaacagagcgagactcttgtctagaaaaaaaaaaaacaaacccataaaacaaacaaacaaaaaaaactatgaggattgagtgattcacatttctgaatcgagagagagaaggatgggcagcaggcttgttgaagctggaaggccagggaggtcgcagactgaggaagaccctggtgtgtcccaggtacctccatgcaaccctactagagaggtggtctctggcttcctatggacaagctctaagggacccagctatggggcaccagagcccagcgttcagcagctgctcaatgaatgtctgccaggcgagactgcacccaaagcatttattaggtacataattgtggcagcactggctggccatggaaggcaaggcagaacacaaggagctggagctggcggaaggaagtcattaagtcagccagtggctgggatgcagcaaagccaggcagaaggtaagtgcagacycaccccaataaatgaggaaaatgagaagggctggctggccatgttaggatccagttccagtgcgaccagatatgtcaccaccacatcacttttagctcctccccccacccacagacaccctgtttgcctgtcatataaagaaggttttcccaaagtggtttagccagaactggaagggccccgccctgtgaagggataggagcctgactgttgcagctgcagtgagtggcggggaagcagcagcggccaggatgaatcccaggtgctctggagctggatggtgaagtatggacatgctttattcgattttgcattgacttaaaggtttaattattttaggagttcttgtagacattcctgaaaaatgcaggtaggcaaaaagaagaaaacaaagatcgcaaatgtgaccctttcattcggagagaacaccaatggaattttgttgtgcacccttctatgcacgtctgaatgttgtgtagacattctgcttacaactaggtgtgggtgctgctgccgaargctttatttgctgtgcctgaggtggaccagagatttcagagaagactcccagagcaccccaaggagacaacaggagtgcttggagtcaggatgactgggtggatttaggactatgtgattctcaggagcctctctggattagccccaaatcaaggataaagagaggcctagctggactcttcctcccagagccctgctgggaaaatggagcccctttacagcccccacttacccatcaggccctgctcctctcactcatctccagacttctgtcacatgcccaagtcctgctaactgctgtgtaaaactggtaaggtgggatccagaggaccttgggcccctagggccccaggtcaggagacctggsctccagggccagttgagagtgataaagagaacaatacctgcccacaggacttgttgcaatgagataaaggcagaagtcaccagttgtggtcaaatgggatttttttccagagaagtctcacagagagtggctttcaaattctttttagcagcagaattgttgtaaaatacaatctcatgtgaaaccctaaaatgtgagacactctgggtgaagcagagagaggtgctcaactgcccaatcctgtcctcattcctccctctcagggaggcacctctgagaacccactttaaagaattttgccttatgcagattgaagaggcaagctggctggaagaaactgggaagctccacttcccaccgcctctgcctgggtggcagtcatctgagcctaggctagcccctccccctccaaagacccactgcgggctcccctggggccagcctccaggatgggtggggcacctgaagcagcaagtattgctatttttctgggctgacctttcttctaggcctgaggacaagtgggtaggtggggccagccctgtccctgtttcccctcaatggagttctcttgctcacagcctaaggaagaagcgtgagtcacttcctgcctcagtctgactgctggagtattgttctcccaactgtggctggcgctacccagtgtggcccctacaagtcttagttccttggcggaggggaagtccccactttgggacaaggccaactggacttatcttcccgctcaactttgaggacccagcattgttcctccagtttccagttcttgcagtgtttgtaaaggtgcccgaatcgtacctgatcccattcactaaatattatctccattttatagaggggtaaattgaggaagtccctgagaaattaacttgtctaaggtgtcccarcaaaaaatagtgccccagggatttgaaccggtttgctgattgatttttcaccagttgccttaagaattatcatgatttaacctctctgggcctcagtttcctcctctataaaatgcagacagtgatacatcaaaggtacttaaaggaaaatgtactgtacccacctcatggggcatgtggtgaggataaaacgggttgacacaggaaaagagctctcaatggtgcctggctcatagaaaacactcagtggattttttttttcccattacccgggaacctgtgttaaggaggccacaggctgatcctgtgcagccaggttatctcacagggagcgagaagagatgggcacaggctactctgcgaccttggaataacccagcctgggaagctcctggccacattttccttcttttctttctcagctcaagcagcgtcggcctcagccaagtagcacaaacgttttctagggcccagggagggagaggctccggctggtatattgcaagtagcttggattcaggctctgccaaacaccccagtctcttgcaggatctgaggtctgctggttgtgggactttgcgcaaattatttaaacgttgtgcgcctcagtttccttatctgtaaaatgggattaataatctcagcctgaaaggattatgtggattaaatcatgtacataagaaggagataatgtaaagtgactggcctggtgcctggcaagcggttggtgtctaaaaagaaaaaaaagctaaaaatattaaaaggaggtgggctacttctgctcatatatccacctgtctatacaaatgcagacgaagtcgtgactcctctaacagtaggccaagaggaggctggtcctgccgccgtgcagtcctccctcgacctgggagtggaggaccccaggtccgccgtccctgggcacttaacccggtcaggctcaaattcgtcgcccaggagtggggaagcgggggacggagagggccagtcccccaagagtccggctgaggcagggctcggagtgcctcccccaagcctttccctttggttccgagttcgggtctccgcggccgtcttcccggggagctcgcggggcgaagagccgagcccgggggcgggggcacggcagcggggcctgagggacgcgccgggcggccgcgaggactttgggatcgcctgccccacttcctacctgcccctaccaggagccggagcagcgggcgccccagaaggccccgcagggccgccgcgcggggccggacgcgctggggcccacggcgctgggaacgcgggcccgcagtcgggcccgggcggcatgggcggcgggcggacgagccggagccggcggtggtggcggcggcggcggccggggaagcgcggaggtggcgccgcgagggggaggggcgcggcggcggaggaggaggagcccgggccgctgcggccgccgccgccgccgctgacaccggcccgagtaaacaagccgcgccgccgcggcccggccgctgcccccgcccgcgccggagctggagcccaggccgagccctgccctggtcgccggccgggccgaggccgcgcgccggcctccccgcctccgcgccgtgacgctgccgccgggcgcggggaccgcgccgagcccaggcccccgccgccgggctctccgctcggccgaggggcgcccgagccgccgcggcggtcgcctggaaaagtttccccgccagggctccccagggtaagtagcgagggcgcggggcccggggcccggggaaggcaagcgcgtctgggagccgggcccgaggggagccggccgggccgggccgtggagctctgccccaggagcgggctccgcggcccgggtgctcgggccggggagggtcggggcactggcgccggtgcagccctgacccgggtcccccggggcccggctgcccgccggctttccggaactggccccggggccggccccgagggtggagctgccgggagcagacagggcgctccgcagcccacctgagcgcgccgggcccgtctcggccccccggccgtggctggtacttttccgcgtggggccagggcgagccctctgacctcaggaagcgcctgcggggcccctgctgggggcgggatggggagaaaattccgcaggcgccgggtgctccagcctccccgccgccaccggggctgccgccggctcgcccactccgcggccgaggagggcctgcgttccgcccggggaggggaggagcggccgggggcgaggcgggggctccttcgcttgggcctcgcccccgcccgcacacctgtgcggccaggactcgggtgcgggatccgcgggcgccggcggccggcgcaggtaggtccctgggctgccttctgccgcggcctggccgaggcccctgtgcccccgctgtgtggctggaccaaggggcggcctgcttgccagacaggtctgacggcagtcacttgtctggtcagaacccgctttcccatcatcctctaccccctggcccctggggtgcagaccctcatccaccggagagtgttgggattcctattctgacttgggaagtgcgaggagaacccgggtgatatggcctggtgagggcgggtgctgagcaggtgtggacacagcataggagattagccaagcctgacctcttctcaagcagggcagccctcgttttactatttcctatattgggcttctacggagcatttgatttttaaaaaggattctgtggctttttaaaaagtttgaaagccgctggtccagcagtttttaccaccaaggaaactgaggcccagggagaggaagtgacttgttaagatcatccagcaaatagtgggcagggactgggagcgataaattcacgggagcctcccagggctggtaacaggaccccgcgtggtgtctctgctagagggagagactgattgggtgtccgagtggccctcccgtggcctgctctgtggctgtgtcagagccagacccccagtgtctgggaaacagcagtcggtcctggggtgaggcgcaatttgagtggcccagagtggctctctgtgtcaggaggttctggtgctggagaaaagggctttgcccaagaacacagccaggaagagcacccacagctctctctggccacagcctggaacagagtcccatgtgaaacaagaccatgagaaatacagcaagcctccaggtttgagacaaactgggactagagggtgagtcagagtctgggatgggggtggggagaaacccattcattcattgttttcagttcttactcttttcggggatcctcccttgtcccacatgctgtggcagagccgtctgtgggggtctcattttctggaagccatccccacccctcaccatggctggggttgttggatagagggaggctggccctctttctttggggggactgttcagttgcgcctgamgcctgctttctttccgagtgctgcaaggtaattaaatagttggttaatcactttyaacgccaaacagctgcggctccatctacagtgtgctggaatctgggctagacccagatgaacccagcctcgatttgggggctccagcaggactcacagcacggtggttggtggtggtgggggcaggggggtggttgcatgacatctggacccaagaggcagctgttgtggcagcaagagagaggagagagatgaggccccgttcctatatggctctgctcccagggtcccacatcctctgttaaatgagggacttggggtggggggggcggtccttccatcccctagggctggggcgcctagctgcccagccattgatcaggccagctttctggaaccaaccacccaaagcaccatggggctgtggttccgaggcctgccctggaagtcctgtggagtctgcccgcagggatgtgcaggagctgtattgtagwtgtctcctgccatcagctgtcaggttattttggtccaaactgaaaatactccaggaattgtgtgtggagtacccccagcctgcagggtgggactgcagcagtcagggaggccggttgtgtctaagggcagcttctggagaagcaaggagttttctgtggtgagcctgcctctctagctccccagggcctacgtgagctggggtgccttccttttggtatccggcagagtggccttggctatggaagtgctaagggcatccagggccctgctgctgctcagggagcttggcaytgatatgggatacccccagcagcactgctgggacctcccctagcttcccccmcttcctccagggccttggcttctggctagtcaggggcactatgtggggacagttatgtggccccgggcagagagaggtcccgccgtctgtttgctgaaggaggaaaaacaacactcggactattgattcagtctcaccttggcgctcctggctcagcagccagtgtttgccctggctgcctgggctcggattacgcaaggctggtgggcgtggagcaagcaagggggcagctgggggcctccaggcccaggcagggcagggcttggcggccccagcgttccccaggaaactgtaaaaacgagtctggggccctgactttgctgatagcggccatctcagccatagagggaggtgaagcctctgtgatctccacccccgcaccccctcaggacatggcccctaaaagcaccatcccatttagggtcacccattttcttcctaggagctgtggggctttgcgaataactysctatggctgaatctgctttgctgaactaggaaaccctagtgagttgtatagatgccattcatttaagaaccttgaaaagccaacatcttattcccatgtaaaacatacctaggtgatttggagaatacagtgacacaaagaagaaaataacaattacttgtaattctcaccatcttgagagaaccaccgttaacattttttagcgtgtgtatccttccagatttcgctttagtttgtataaatatacatgtataaatagtttttaaaaaataaaatgggattatgtgtacatactgctttataatgcatcttctttaccttgatcatggtgaacatttattcatttgttgtttctgattttgagtgactcagggcttgatagtcttcatcctgcttcttctgttacacttttttttttttttttttttttgagagggagtatcgttctgtcgcacagactgggaatgcagtggcgcgatcttggctcactgcaacctccacctcctgggctcaagcaattcttgtgcctcagcctcccaagtygctggcactacaagcacccgccaccacacttggctcatgtttgtatttttagtagagacgaggttgcaccatgttggccaggctggcctcgaactcctgacctcaggtgatccacccgcctcagcctcccaaagtgctggatgacagaaktgagccaccatgcctggcccttctgttacatttcttatattcttgcrtggagaaaggattgggggggattgtgagggcatccatctgtccatctatgtggctggccttgggggctagatttcttctggggaggactaatttttttacccttctcccccagatctcatttcaggccccaattgaaacttggggtgggcagggcagctttagtgcgtagcaggggaggaactgaccctctctccccttttcccctcttgttcctctcagggtcggcactcttcaccctcccgagccctgcccgtctcggccccatgcccccaccagtcagccccgggccacaggcagtgagcaggcacctgggagccraggccctrtgaccaggccaaggagacgggcgctccagggtcccagccacctgtcccccccatggagctgaggccctggttgctatgggtggtagcagcaacaggaaccttggtcctgctagcagctgatgctcagggccagaaggtcttcaccaacacgtgggctgtgcgcatccctggaggcccagyggtggccaacagtgtggcacggaagcatgggttcctcaacctgggccaggtaggtgttcccccacaggacactgccagggggtgggaccagagaagacagggattctgggagcaggagctgttggccttgtttgctcaggggcatctgggtagccggcatgttctgggtggccatgagcaaagcacaggtggttcaggcaagcagcatatcccagtgagagtgagtcctcatggtccccgcattttgctgggtcccggacagggagcagatgccccgcacccccgaccgtggcgagcctcccatgaagccgttgtccacccccgtcccccgcctcccggggactgacagatggaaagcccagctcagtctccctgctctattgcagatcttcggggactattaccacttctggcatcgaggagtgacgaagcggtccctgtcgcctcaccgcccgcggcacagccggctgcagagggagcctcaagtgagtgtggccccagccccctcctgctgccaccctccccctcctgctctcaggagcccctctcgcctcctgctccacccacaccatctctccctcactcccccacaggtacagtggctggaacagcaggtggcaaagcgacggactaaacgggacgtgtaccaggagcccacagaccccaagtttcctcagcagtggtacctggtacgtggccttcttcgctgctgggacctcctccccagatgcaccatccacccactatgagctcttggatggaggaggctgtcttcgaggcctcctctgattcgtttcctttcctcctgctgggcagtctctccttggcccatcctaataagcaagcctgggggtggccctcccagagtcctctacattcccatggagtccagacagccagtggckgcctttcaggagcagggatggtacaggaggaggttttacgggggcaaagggattcttcaagatgctcctagcctcacaaaaccaatcatgtctcataagtgatggggtgggtgtctccacagtctggtgtcactcagcgggacctgaatgtgaaggcggcctgggcgcagggctacacagggcacggcattgtggtctccattctggacgatggcatcgagaagaaccacccggacttggcaggcaattatgtgaggaagtcggggagggaggccrtgatccctgctgaggtgtgtctagaggctgtcttgttctatcagtgaggtcagccttctcctgatggtggccaaatccttcttaggatcctggggccagttttgatgtcaatgaccaggaccctgacccccagcctcggtacacacagatgaatgacaacaggtaagaagtggcaggccccggtctctgcctcccttctcctttcttccactaaggaacagggctgagcctgggtgagatgtgccttgcctaaaaggctgaggcttttcccayagtcctggcccacctggggctctgagggagggctcggtcagagtggagatggccacaggcccagtggagtgtgggagaygggggctgggtactcaggggatgatgggtgtcrgatgtgcggatccctcgtgctcctcaggccacatctgccgggccctgttcaccccatttgttctactcatgctmcgtgcttggccctggcaggcacggcacacggtgtgcgggggaagtggctgcggtggccaacaacggtgtctgtggtgtaggtgtggcctacaacgcccgcattggaggtgagtgtgggcctgggccaccctgtcttcaggagggcccttcagtggaatttttcccgcccacttcccatctggccaatgcctgccactttccsactgtggatcctttgatcacgtggctgttccayggagggttcccaaagggtcaaagactgaaagagctggacccctgtggagtgagggtttcctagcaggagtctcctgaaatcctcacgacccactgtgagtcctcacgtggcagatccttgatcaccaggctcttttgggaaccagagactctttctagtcctgaatgtgtggttgggggcaggaggtgttctctttttccttctctgggtcttgtctttgaaaggcagaggcaaacaggtagttgggggttcagggtttctcagcatcagcctccacccttcycttactcatcccctggggtgcagggcygggtgtgctccttggggtgggggccctgacagctggacccatgcagcatccctcttcgtgcccccccttcacggccaggggtgcgcatgctggatggcgaggtgacagatgcagtggaggcacgctcgctgggcctgaaccccaaccacatccacatctacagtgccagctggggccccgaggatgacggcaagacagtggatgggccagcccgcctcgccgaggaggccttcttccgtggggttagccaggtgaggtggggatctgtccagyccctgcgggcaggttgggtgctgtcttccgtacctatcttgtgttttttggtttgttttatttattctcatgtttaactttacacaaagcatgtttattgaaacattaagggacagaagaagagtagagtgcatataccacttggacttgcctaattaaaaaacacattttttttagaaatgaggtcttgctgtgttacccaggctggtctcaaactcctggcctcaagcgatcctcccgccttggcctcttggtctgattttttgtgtgcctagatagacatatttggatacatacttgatccaccagggatctcacaggggacaggaggttcccagagaatgaggctccagccttcccagttttccagcagtgtcctcctgccagccctccctcaagtcccaatcttgaatgaccccagcccactctgtccacagggccgaggggggctgggctccatctttgtctgggcctcggggaacgggggccgggaacatgacagctgcaactgcgacggctacaccaacagtatctacacgctgtccatcagcagcgccacgcagtttggcaacgtgccgtggtacagcgaggcctgctcgtccacactggccacgacctacagcagtggcaaccagaatgagaagcagatcgtgagtcttacctgggggtgggggctggggagatggggctgctggctggctctgtccagcaccctcttttggaggctgtctgcctccacccccatgtggctgggtgatagtggctcaggcatcatgcaacatgaactctggggctctgtaggttcttggaggccatggagccatctctgaagactttgaaaagcctagactctctctaaaaacatactttgttcttattcatctccaccctctagttgaacccccttattcctttggaaaatgaggcccaggaggggctcgtcattagcatgtccacggcaagttagcaaggcagcagctgggaccyggggttcttggccctggctccccataccatctgtggtgcccagggcctgtatgcagagggagggtaggcaggtggctcctctagccccctccacccatcacaggccccaatatgattctcttcctggcaggtgacgactgacttgcggcagaagtgcacggagtctcacacgggcacctcagcctctgcccccttagcagccggcatcattgctctcaccctggaggccaagtaagtgggtgggggccagcggcaaccctgtccctaccagcactctctgtagggcagcccttagggcagctggagagctgctcccaaaaaagactgatccccakcctctcccttccttctttgcagtaagaacctcacatggcgggacatgcaacacctggtggtacagacctcgaagccagcccacctcaatgccaacgactgggccaccaatggtgtgggccggaaaggtgagggcaggctggccyggcaggctggatgtggagttaggtagaaggcactctgtgcctgacagctgaccctaccttccctgtccccacagtgagccactcatatggctacgggcttttggacgcaggcgccatggtggccctggcccagaattggaccacagtggccccccagcggaagtgcatcatcgacatcctcaccgagcccaagtgagggctggacccaggctgggagggggccagtgggacctgagagtcgcagggggtgcccgctggtccctctgggccaggctgaccatcatggtgctctcctgcacagagacatcgggaaacgkctcgaggtgcggaagaccgtgaccgcgtgcctgggcgagcccaaccacatcactcggctggagcacgctcaggcgcggctcaccctgtcctataatcgccgtggcgacctggccatccacctggtcagccccatgggcacccgctccaccctgctggcagccaggtgcttgctctgtccctgcccgccctgcccagcgccgcckcctctcacagcccgcgtgcttgcctttgctcgctcacacggcccagggggcactgagtgctactcagtggggcactcttggcattttgggagggacaattttgtcctgtgggactgtcccatgttgcaggaatccctggcttgcaaccatttaatgtcagtagtgtgccccaccttgtgcggtgcctgtgtacctttctagaatcccccagttgagcacgtctggctcactgagaaacagccaagccagcaggcacttctggccccatggggttggtctgcktgggggaagggtgtgtggcccatgtgctgtgggttagatgtccctggcttggggtcccgcagaggcctcagggctgtgtgcactcccctccccaggccacatgactactccgcagatgggtttaatgactgggccttcatgacaactcattcctgggatgaggatccctctggcgagtgggtcctagagattgaaaacaccagcgaagccaacaactatggtactgggggcacttgaggggtaggggtacgaggtggagggctggcaggatctcgagcactgggtgtggtgccagcactgtcttaactcttgcctcctccccgctctggaacagggacgctgaccaagttcaccctcgtactctatggcaccgcccctgaggggctgcccgtacctccagaaagcagtggctgcaagaccctcacgtccagtcaggcctgtgtgggtcagtagtgggtgctgttgggctttgggggcctgagtctgggggtaaggcgggtgcctgtcctgaagcccagctctaacagaaaaaagtctcaagagacctagggcccctggggctcttgggatgaccacagtcctggggctggaggatcctggggatgtggtgacttggcttggggctgctgtggtcctggggctacagtctgtttagctgacacacacttgccctctctcccacgccggcagtgtgcgaggaaggcttctccctgcaccagaagagctgtgtccagcactgccctccaggsttcgccccccaagtcctcgatacgcactatagcaccgagaatgacgtggagaccatccgggccagcgtctgcgccccctgccacgcctcatgtgccacatgccaggggccggccctgacagactgcctcagctgccccagccacgcctccttggaccctgtggagcagacttgctcccggcaaagccagagcagccgagagtccccgccacagcagcagccacctcggctgcccccggaggtggaggcggggcaacggctgcgggcagggctgctgccctcacacctgcctgaggtggtggccggcctcagctgcgccttcatcgtgctggtcttcgtcactgtcttcctggtcctgcagctgcgctctggctttagttttcrgggggtgaaggtgtacaccatggaccgtggcctcatctcctacaaggggctgccccctgaagcctggcaggaggagtgcccgtctgactcagaagaggacgagggccggggcgagaggaccgcctttatcaaagaccagagcgccctctgatgagcccactgcccaccccctcaagccaatcccctccttgggcactttttaattcaccaaagtatttttttatcttgggactgggtttggaccccagctgggaggcaagaggggtggagactgyttcccatcctaccctcgggcccacctggccacctgaggtgggcccaggaccagctggggcgtggggagggccgtaccccaccctcagcaccccttccatgtggagaaaggagtgaaacctttagggcagcttgccccggccccggccccagccagagttcctgcggagtgaagaggggcagcccttgcttgttgggattcctgacccaggccgcagctcttgcccttccctgtccctctaaagcaataatggtcccatccagrcagtcgggggctggcctaggagatatctgagggaggaggccacctctccaagggcttctgcaccctccaccctgtcccccagctctggtgagtcttggcggcagcagccatcataggaagggaccaaggcaaggcaggtgcctccaggtgtgcacgtggcatgtggcctgtggcctgtgtcccatgacccacccctgtgctccgtgcctccaccaccactggccaccaggctggcgcagccaaggycgaagctctggctgaaccctgtgctggtgtcctgaccaccctcccctctcttgcacccgcctctcccgtcagggcccaagtccctgttttctgagcccgggctgcctgggctgttggcactcacagacctggagcccctgggtgggtggtggggaggggcgctggcccagccggcctctctggcctcccacccgatgctgctttcccctgtggggatctcaggggctgtttgaggatatattttcactttgtgattatttcactttagatgctgatgatttgtttttgtatttttaatgggggtagcagctggactacccacgttctcacacccaccgtccgccctgctcctccctggctgccctggccctgaggtgtgggggctgcagcrtgttgctgaggagtgaggaatagttgagccccaagtcctgaagaggcgggccagccaggcgggctcaaggaaagggggtcccagtgggaggggcaggctgacatctgtgtttcaagtggggctcgccatgccgggggttcataggtcactggctctccaagtgccagaggtgggcaggtggtggcactgagcccccccaacactgtgccctggtggagaaagcactgacctgtcatgcccccctcaaacctcctcttytgacgtgccttttgcacccctcccattaggacaatcagtcccctcccatctgggagtccccttttcttttctaccctagccattcctggtacccagccatctgcccaggggtgccccctcctctcccatccccctgccctcgtggccagcccggctggttttgtaagatrctgggttggtgcacagtgatttttttcttgtaatttaaacaggcccagcattgctggttctatttaatggacatgagataatgttagaggttttaaagtgattaaacgtgcagactatgcaaaccasgcccagtctccagtgtggtaccgttgctcctgcatcgcagctgaggatagggggccagttaggcctacacagtggcctgcctgcctggatgtgggcccaagtcagaaggccaaagtcctccaaggggcgggaggatgcgccagcccctagtggaggagctggtgcccctggggtggggctggtgacccctggtcctcaggagctgagcactaaactcccaaagtcctggtttccagcagtgtgaagaactgggcctattgtgtcttcctgggctgaagtgatctggtcgccacaggctatagggctgaggcctaaggtggagggaggcctgactgaatcaagatgacttcttgtggggagcctgagtcccaaatggaaaactccacgcctgtccgctccccaacccctgccccttgatttccccaggtctcccttgggacaggaagcccctgcctgggggtaggaggatggggacaaaaccactaggatctgtayccgagaagcagtctctgttcgggatatttacttggaaattttattcaaatggaagctggcgcctgagcctctccttagggaattccgtgaggtggggagggctgggaccagggttccctctttctcttctgcggtggccctggcctggtgctaggactgcgcgcctcccctcagtacccgcggacaccctgggcttccctgggcccagcatctgcctggggcctcgccctgggytccccctcctgacccccaccttgcgccccttcccggtgttcccggggcgctgccgggccctggggcctgcggggcgcgggcggctcttggctgggccattctttcccggccccctcctcccttccgtttccgtggccgtgcggccggctagaggctgcggcccagcgcggagcaggggggctggcaggcgtcgggacggtcgggccggtcccgcccgccccttcccctccacaggcccgccccggggcctgggccaactgaaaccgcgggaggaggaagcgcggaatcaggaactggccggggtccgcaccgggcctgagtcggtccgaggccgtcccaggagcagctgcccgtgcgggtacctctagccccggggcctggaggagcggtgggagctgggggcgcggcaggcaggggcagagcaggcgttccgagggccagagacccacccaggtcggggtaggggccgcggaagggcggggatggccgcaggggcagggctcaggctgtgggcgcctgaggcttcagctggggcaggcttggcctgtcgaggacctgggcaagggtgtccctgtaaggggtggtgggtggaagggcctggggagggaggctccaggttggctcctgttcccgaacgtgcggaggagaccctgacgctaaggaagcaatgagggccagtccccaggccaggctgctgctgggtacccatggctgcgtgtgagcgaggcaggaccccacctcctccccgtctgcagtccatcctgaccctacagtccccagcctcctcgtcccatgcctccgtctccagctgctgccttgcctccagggatggccccttttctgtccccagaacagcactatgggcttctcttcygagctgtgcagcccccagggccacggggtcctgcagmaaatgcaggaggccgagcttcgtctactggagggcatgagaaagtggatggcccagcgggtcaagagtgacagggagtatgcaggactgcttcaccacatgtccctgcaggacagtgggggccagagccgggccatcagccctgacagccccatcagtcaggtgggtctctatgggactctggtgggtgctggcgtatctgccttctccttcctctcctgggggccctctggggcagtggctggagatctggcaggccaatgcttgggagccattgtgcccccctccctgcctcccccatctgtgctgtatagtcctgggctgagatcaccagccaaactgagggcctgagccgcttgctgcggcagcacgcagaggatctgaactcagggcccctgagcaagctgagcctgctcatccgggaacggcagcagcttcgcaagacctacagcgagcagtggcagcagctgcagcaggagctcaccaaggtgagcgggcagcactggggcttcggtcatttctgtctaaattttgagcctcgaaggggttgttttgcacaagaggccctggattcactggggaagtgtaagtccctgaccgcaggcctggcttgctctaaccttgatgtagcttcctctcttccttcccctacgttgagctggcttgcagcaaggcctctctgtgctttttctgtgcctgggcaaagtgctgggagtgtaaggatgagtgaccggtcacgtgcctgggagaagctcagaatcggtactcgcctccacactgtgccatctggctctgggttctgagagtcagggagaggaatgagggtcagtctgtttgccttcgacctatgcagcctcctctcagggcccgagactgggcagcagcatggccccccgaaggtcgaggactcgggccgtgaagtcagcctgcctaggtttgaatcccacccagctcctccgtctagaggctgtgtgatttggaactatttatctgggagcctagtgcccccattcagtgtgctggtcaccctccctgcaccacaccccttcctcaagtgcagagcccagccttgccatggacccacagcggcccctggtggccaccctggccccattcctcgccccaaaagatcatctgattcaagggtgggcccatttttataaagttttgctggaacacagctatgcccctttgttttcatattgtctgtgactacaatgacagagttgagtaattgtgacagaggctctatggcctacaagcctaaaatatttatttactatctggccctttaagaaaaagactgatctagtcgaggaatctagctcagttacagatggggaaactgaggttgggcgcttgcccaacatatcccagcacataaacaggagaactgggacgagaacactgatctcgggctgtcatctattcctactgccaagaacataatttgcaggacccagtgcaaagtgaaattgtgggggtctttgttaaaagattgctaggaatttccaggtggcaataatggagaatgaaaccaagcacagggcccttctacatgtggagccccgtgtgactgcacaggccgtgcacacctgcaactggccctgcctgccaccaggctaccactgtcagtccaaggagggaccgttgtagcctgtagtctacctctttgcctccccaaggggtctgtctttaacaggctctctgatctttgactctcacgtcagcagccagctttcccagaagtctccaggtgctccttgcctgacgacaggacctttccagggcttcaccccaggcaagaatcttccacaactggggacctgctgccccacactggcctctcctctctccctagacccacagccaggacattgagaagctgaagagccagtaccgagctctggcacgggacagtgcccaagccaagcgcaagtaccaggaggccagcaaaggttcgtggcttcccttgctggcagggagggaatccgaagccagtgctgacctgtccttgggtacccagagagtgggggctgcctgggcctccatgctgtcatctataccccttgccccccttctggcagacaaggaccgtgacaaggcyaaggacaagtatgtgcgcagcctgtggaagctctttgctcaccacaaccgctatgtgctgggcgtgcgggctgcgcagctacaccaccagcaccaccaccagctcctgctgcccggcctgctgcggtcactgcaggacctgcacgaggagatggcttgcatcctgtaagcccgcagccccgtcccctggcccccacccttgagcagccctaagcccagccatcaggcccagaggcaggacccagaaaatccattgctgggaaggtgctggccatgtaaccacatgagaacgggacctgggccaaggattggaaacaggcaacttacctctgaattacactattccagggtctcattattccagggttttattacattcattgagcactgttctgggctctggattataccagagaacgatggtagacaaaaacatctgtcctcagggatctttcgtgttagtggagtgaggatgtgaggagcactaagagccatggagaaaaataaagcaagagaagtggatcgggacctgggagcacggaggcaagggaggaggtgacagttgtccatagagtgatctgggaaagcctcttgagaggtgacattcaaagaggcccctgagaggggtacgggagtgaatcatggggctatttggagaaagaccattccagaaaggaggacagcaattacacaggccttgaggtaggagagtaccagggactaatagccaggaaccagtggtgcctctgagagtgagggagggggagagtcatacacgaggctggaggaggcaggcgtcaagggctactgggtgatagaaggtctagcagggccatggtgaggactttggctctgggtgaacaagaatggcatgatctgacctctgtttttttgtttcattttgttttaactttttttgagtcagagtctcgctctgccgcccaggctagagtgcagtggcatgatctcggcttactgcaacctccgcctcccaggttcaagtgattcccctgcctcagcctcccgagtagctggaactacgggcatgcgccaccacacccagctaatttttgtatttttagtagagatggggtttcaccatgttgcccaggctagtctctaattcctgggctcaaagcgatttgcctgcctctgcctcccaaagtgccgggattacaggcatgagccaccatgcccagccctgacctctgttttaataaggccactctggctgctgtgctgcaaatagacttcagggagcaaggacagaagctgggaggccagagagcaggctcttgccataatccagatccaagcttttggccactaggacggggaggtagcaatggaggtgaggcgcggtcaggtcctggaaggtgaagccagtgggatttccctatggattggaagtggggcrtgaaatagaggagtcaggggtcactctggggatttggcctggagcagctggaagatggagtggctgttaacttatgtagggaaggctgtgggaagaagaggtttaggagacaaggatagcagttcatttatttatttatttatttatttatttatttatttatttatttagagatgtagtctcattctttcgccaggctggagtgcagtggcgcgatcttggctcactgcaacctccacctcccaggctcaagcgattctcttgcctcagcctcccgagtagccaagtagctgggactacaggcatgtgccaccatgcctggctaatttttgtatttgctttttcagtagagatggggtttcaccacgttagccaggctggtctcgaactgacctcaggcaatccacccgcctcgacctcccagtgttggtattataggcgtgagccactgtgcctggcccactggatccttattacaactgccagtgtccctcttatatatatcaggaaatagaagattagggagaggttaaataatttgcctagagtggcatggctagctcgaagtgaggcaggggtcaaccccagccctgactccaaacccagggtcctaggcctgaactgcccagccttgcccagcctgaggctcccctgactggggatcccgtctcgggggcaggaaggagatcctgcaggaatacctggagattagcagcctggtgcaggatgaggtggtggccattcaccgggagatggctgcagctgctgcccgcatccagcctgaggctgagtaccaaggcttcctgcgacagtatgggtaagccccgtccttgctcctg

SEQ ID NO: 8789 - DNA, 23104 bp, Homo sapiens
ttcctttcatatgtggttgtatgaatatggtgggtgaaagagagaaaaaaacttgtttctacttttcacatactttgcttctacttctcacatatttaacctagtctagtggaaataacctgcatttaatgagacaaatcagaaatcaaaatgccactccattttttttactcttttctctgagttgccttgtatatacaagagggaatactatctcccatcaatgcctaaatgataatgtatgcacaattcctcgcacgtaataggcgccaatgaatgtcagctccttttagggttctggggctgggacagcttgtcaccttggagctgtgactatcggtcgtagaatgtgctaattctaatttccaaatgggcttttctcctctgaggtgtcttttcagccgaagtccctgtggtgggaaccactgattctgaatctgttctcacaggtgtgctaagtccttcccctttgtctcatttttactatcagtctggtacttgatctgtagggagtacagccctttactccccgcccccatggcagcctcagccctagcttccctttgggcttctctctctcaccctggtcctcccattacctccaggctgcagcctcctcccctctctcccgccattaagtccttctgcagatttcagctctgttctgctcttgtcttccgttttttccactagccttcaatagtcctttcaaagtattcttataattcaatcacttttttttggttcattgtctttgcctacaatattgatgggaatttctataggaaccctctaaagtgctccatttccagaattattgcaagtctcttctggagttcttcctgcctgttcccttgagggtattgcaatcccatccatttccgcccctgtttgatctcatctcctcctagtttatgttccctcaccacatactcagcacttggtctcacctaacatttcctgccaggcttcacccctcctgccgtgacatctcacttgttcttattaaataggcgattgtgacttttgagtctccactgtcattcagattagactgtttttctctcagtttattgatctcaagtttgctccatattcggacactttataaacctcgtaggctctctttcctcatgtgcccaggggctctgtaggtcctgcagcgccactctgccttcctgagtacccttgttcttcaacaggaagcgctacctccctggactctctggtgccaagccccacccctctcctctccccagcggcctctggggagctcctgctggtttctcccacccctgcttcctcaggcaagtgtcaggccctggtgcagagctcagagcctgcctgccctgcggatcccttcaaaacagtgatcacagcatgttctgattagggacatcatgtcaacctttcctgctaaatggtgattatggaagttggagctggtccagccagagtatgtgtgtgtgtacgtctacccgcatttatttccaacattcttttctgccagatattttattcagggccaaaataggatttttcaaaattagttgtagaggagggagaaagaacatttccagtagtatgacataaacaggtatataaatatgaattaaacgattgcgtgggggtccccagtcatgattactggagtcattttcagcctgcaagcatgttcctgcccccgcatcttcaagcctcccttggaatagctcacttgtagtaattcttaaggtctcatttaatacacaattttcacaggaaacccttcctttactctctccaaaacacctgactatttgaatcaatgagcgggttactagagaagggcccttggagtttcagaagcatcctgcattttagtaaatgtgaaggattgatgttttgttcatgatgaaagtgctcagcagcatatgtccagtggatctgaggacagtgctactgctgtttcttagatagacatgctactgcatttccgtgttgccaacgcagccactcagcaaaggcctgctgagtccctgccaccagtcaagggctggtttcaccctgaataaggcaggccccacacctctgtcttcccaaggtggctatgaaaggggcatccatccagggcccctgagagtgcagccctgcagaaggcatgctgggcagtcacccctatgtaagagggggaggaaggaaaagaaaaggccgtggagactcccagaaaaggctgaaagggaagcagggagagcgattattcagaagacacagaggaaaagcagccttgggaaaaaataaaccataagcaccagaagatgcagagaactgtggcctctaagaagcagaaacaggacattaaggagcaaaaaggctgctctagaaggccatggaataagatgacaagggacgtggaggaaataaggattaccagaaaactgagctacaacagagaaataaaatctgcattggaggcagtaaaaaccaaaagtgacatggagggaaattgacagagtggtgtggaaaaaacawttcacaagccatttaatatatgcagaaagatctaagagctgaaacaacacagggggaggaggcgggagactaggcaaggatcctcagatttggaagtacagataacccctgaagtggaaacagtactcaccatcataccaatcagaactaaagagacttgttgagttggaaagggctttccctgcatgccaagcaaaatcagcagattcccactgaaactatcgccaagaaacttatcatccacaaggcattgaaaaaattaagtatctgggcagaaaaactcaagctacccttctctaccgaggaagagatcaaaatccagcagcccgatttctcctctggaaacttgaattccaaagagataggagctgaagcactagagttttaaggagaaaggtttgggattgtcacattcccaaacattcaactgggcaggttggtttgttgttaatctgtgaactcctgtcactaaaacaaccacacactgtcatgtgtgacgaagcccactgactccaaaaaaatagcttggatgggatcaggttttgagacgcagcctgaggctgacggtagtccctgcgtccaccccacatggccacagcctccctgcagatcagggagcacatcacgaagccttctccctagagcagcagggaggggccggctgtgcacagggtgggatccttgtcctgagaggaagactttaaaaaaccaagtctctgttctttcccacaaaaccacaaccacctcaaacaacccaatgggctttaaaaatttttcaatggtaaagagtctaaagaattacgttacacaccttttaaagcaataacaaaagccattgggtttcttttaatgggagagacaaataaaccaattggtggcagaattattggccatgaaacatggctgtcatctctaatgtagaacttgtgactgtttgcgatcagtccgcttagtcagtgtgggagaaggagctcatgagaagaacaaaatgaaaaaaagacgaggaacaccccaaaatatgaacattgcttagtgcttgaggttagcatttatatacatagagagagataaacatacagccagccctccatagccacaggttccatatccgtggttggttgaattgatagaaaacattccaaactccctctccccaataatgaaagaataaaaattatacaaataaaaagcaatacagtataactactatttgcatagtgttacattgtattaggtattataagtaatccagaagtgatttatagttcatggaggaagtccataggttatatgcaaataccatgccaagggactagggcatccctggattctgccatctttgtaggtcctggaaccaatcccccacagatactgtgggtgactgttttacatatatatgaagacagatacatatataatatttctacaaggagtacatatataatcagaaaagaaattcatttgtttttcttgcagaaagagagggactagagtgtggggtaagagtcacgcgaggctgtcctccacccctccttgagcctgttacagcttcattgttgcctgcttctaaagataaatggctttgctttttcagaagggattgggcccaggaaaactgcctctctgggagtcgagtggggtgtgtgtgtgtgttttcttataaaatgtttcaagcatgttttcggtgggacagttgcatcctgaggcccagccataaggctttgtcttgtttttctctgaatggctgggcttgccaaggagagatagaccctgggagcgaaacagctggcggtgcctcagcccctctttcctcccaaggaagcgcattgttattaactgggaattctttatagccgggctggaggaagttttggctgtaaactgtcatgcactgcagccttcgctgaaaaggcggagggagtgggcctggtcctgggaaccgaggaacaaagatcagaaaatcagccacagaaaggggaggaaaaataaacgttagaaagtgaagacaggtgacactacacaagtgctggccaaagtcggtgacttccaacctctacctcctccgacttgggtggttcaattcctgggtcgtactcttcaatgcttcagacattctctctggagagtagaaattttattacgcgtgttagaaacggaatattctttcctgctgaagttgtattcttatttggccgtgcccctcctgttcggaacagttttagagcgatctgttaaaccctccagtcttctttggcgcttcccgactgtgggaaaagcggccgcgacgccgtccgagcgcaggggagggatccagccttcgggactcctttgccctgaagccgcaggagaggtttcgctcccgtgcctagggttccgaggccctcaattgcctgggacccaccctcgttcctccttcacctcccctccacttttcccttttatcttatcctcgggaggccttgggccaaagcgatgacctcttagacattttaatacccggagtaaggagagtaacacgcaccacgctctcccccaaagcccaggacccgatgagccagtgaaggcgtgtcaggagggtccggcgtcaggagcaaatgaggtccttttggtgcctctttctagaaggaaacttccccacctcgggtcagccccctgggaatatccatgcatcccagacatcaaaagacactgagaaatgcggacagggactagacgctccggcttcctgactcgtcggtgtaagttggagaagggagagaaggagccctgtcccccacgggcggcaggcacccttccccgggactggctcctggcagccctccgcataccgcgaggcgggtcgatccctcgagtcccgggcggggatccctccttcggcttccccagcaattcccgaccccggagcgagcccggctgggcgaggggcgaggggcagggggcagggggcaggggagacttagcgcggggcgcagataccatgtccgcgggaaagcccccttgctagggcgcaagactcctctgaactcgctgccccacccgatgcgcaggctttctctagaggggttggggctggggtgcccgctcaggagaccgggaaacagaggctgctacccgaggcaggccctcgtccagcgaatgggcgaggtgtgcagaagcgcaaagccaggccttggaagggggagcttctgcctccttcccccttcctgggctcccgttttaggaggaatgttactgtttaaagagaccccactgaactatttcstgctcaktgtcacctctccttcgctctcctcgcgtaagttctcaccgaaaggtaataaaacaaccgctgccgacaccgcttggcgctgggccgggcggggaaagcgccccgagtcccactagtccggaccacccsgccagccccgaccttctcccaccttccgtgaaagcaatgacacagcagaaaccacgcacacgcctggcacactcgatgcgcgcgctgacctcggcaacaagtcctgtttttataagagagcgaggaggacacttctcagaaggggttgttktgcttktgcttatttccgtccatttccctctstgcgcgcggaccttccttttccagatggtgagagccgcggggacacccgacgccrgggcaggctgatccacgatcctgggtgtgcgtaacrccgcctggggctccgtgggcgagggacgtgtggggacaggtgcaccggaaactgccagactggagagttgaggcatcggaggcgcgagaacagcactactactgcggcgagacgagcgcggcgcatcccaaagcccggccaaatgcgctcgtccctgggaggggagggaggcgcgcctggagcggggacaggtgaggccgcgcgaacgttccagcctggcgcggctgcgggatccgggcgcgctgggaaagcgagsaggaccccgcgcgggaatcagggagcatcgcaggctgccgggcagcccctcgcggaagtgcgggctggggcgggctggggcgggctggggcaggccggggcgtccagcttaccttcctccggggcttgccccgccgctttgatggaggtgcaaacatttggagaagggcgggggtgtaggggctgggccggggctcgcagggctggggccccggatttacatgaaacaggcgtgcgggagcccattgttggcccccggcctcccagacccgcccggctgggtctgatatggccgctctcggccaatgggaggctgcccggcacttcaaagcgtgcgcggcccaatccgccgagcaccccagcgctgcsgccgcggctctatttatggggagggcactgaatttcggtccccagagacctacactagtagagccttggggagttcaagtggaataacttctccccacccctctgcccccgtcccctccccccaagtcttggtccgcgccctcctcccgggtctgtgccgggacccgggacccgggagccgtcgcaggtctcggtccaaggggccccttttctcggaagggcggcggccaagagcrgggaaggtggatctcaggtagcgagtctgggcttcggggacggcggggaggrgagccggacgggaggatgagctcccctggcaccgagagcgcgggaaagagcctgcagtaccgagtggaccacctgctgagcgccgtggagaatgagctgcaggcgggcagcgagaagggcgaccccacagagcgcgaactgcgcgtgggcctggaggagagcgagctgtggctgcgcttcaaggagctcaccaatgagatgatcgtgaccaagaacggcaggtgggtgcgcgtccggagcccgcgcgcgccgcgctctccakcgcctgggcagcctgggggacctggcaagttcccggaggtcgaaccctttttctcctggaggagggctttgtgtttgttcccgctctggttaactccctcgagtgcatttctacaagcccctcttctggggctttctccgcggaagcttggggaggaggaacgcgcacttcggtgtcccgacctcggaggcatcccgggacccgcgaggcgcgccctggtccccgcctgtccccgcgggatgtggcctcctgcactgaaacccttcgccaggtcctctcctcccctccctcccgaggccgtggagatggtgaggaggccacctggacctggcagggctcggggaagggggagcttgggagtcaccctckgacgttccccagggggctcctctgtgccccgaaataactgaggcctctgtgcccagcttctgcctccggcctacctggkcagtgtsggggtcctcctgcgcccgccccgtgttttccaggaggatgtttccggtgctgaaggtgaacgtgtctggcctggaccccaacgccatgtactccttcctgctggacttcgtggcggcggayaaccaccgctggaagtacgtgaacggggaatgggtgccggggggcaagccggagccgcaggcgcccagytgcgtctacatccaccccgactcgcccaacttcggggcccactggatgaaggctcccgtctccttcagcaaagtcaagctcaccaacaagctcaacggagggggccaggtaggtgtgaggagcccgccaggtctgggaccagcgaggagggggccgcgctgcgccttctgcacgggggttgtggraagggacgctgcttgaacgggaggcgacgtctgccctggagaaactgccacagccttctctaataaggcctttagcgctgtttatactaagctgataacatccacgcctggcgaacggggagcgggagcactcccctttgaaggactggagcttttggggaacttccgttgtctagccctaaactctcctgggggtggaaaakatatcagccttgatggcaaagtcgcatttaaatttaaacatgcgccacagtacttactgcgtggagtcggaacaaacttgtaaagtcgtgcttttctaaagaacattctttagtcggggattgttcctggaagaccccaggttaggcaagttgcaaacaagctcagtcttttaaaaatgaccatagccttcctgaaarccttagtactttattccaccaggtgaaaggattttgtgatgagcattcattgcttttaatggtgtgtagcatctcacatcccttttccaaacaagctgtgggaatagcacatataaaccgcggagaagcctcccctggtggaaccccacttccctcaacagcagagacactttcttgggatccagaggactttctgcatcctggagaaatggatgttttgctgttttaacgcaggcctttcagtgccaccaatcctgtatctgtctccctcagatcatgctgaactccttgcataagtatgagcctcgaatccacatagtgagagttggggrtccacagcgcatgatcaccagccactgcttccctgagacccagttcatagcggtgactgcttatcagaacgaggaggtgagaaggacagaggcggatcgctttcccggtgtgctgcggtgtggtgtgctgctccgtggagattctggaggagcggggagacgcgctaacccgcactgagaggaaggcttcctgccctttcaaataatattccggaacttgaaatggaagcacaggagakaactgtttaaattaagtccccattcaaacattttccccttgaattctccatacaagtgtttaaaactagaaacaacttctcaatgctcaaaatgaaaagatccaaaaagcattcaggttaaatggtgtgagaatttcttgagaacaagacttgagtgagagaggggcatgtccttccttggaaatcttccccaaagggtgggggggcaacccctcaaatctctgcagtgtgaagactcaactagatacaagctactgcataggtgcctgtaaatctatgcctaagcccaaccccaaagtactgcaaattcgacattagttggataccttgttggtgttgrcgttgaccgaaaactagaacttccaggtctctatttcctaagcagccccagactgtgttttcagccatttctgatttatacacatggaacattgttagtagtaggttaaatttattgtgaatcccactcagaacattgacattgaaaatttttcataagcatgctactctgtacaattactcagctattttcagttccaaatagaaaactgtatgtggaaagaagtctgattatatttgaatatttaaaagtggtactggcatttctcaatttcttggtgccaaattaaatcccctggctaatagggaatatactagtaaatgcaatttcttgtttttcagatcacagctcttaaaattaagtacaatccatttgcaaaagctttccttgatgcaaaggaaaggtgagagaattctaactataaatacccttgggcaaagaagtatgcagaaagatgaaatattgctgcacatactcttttctgaatttccttatttttgaaaattcgatatactttttttttttcattttgatagaagtgatcacaaagagatgatggaggaacccggagacagccagcaacctgggtactcccaatgtacggtttgttgcactctgtcatgtcattctgcgtcatcgggactagacttgctgagagctgggaartggagatggagaagacaagggtgtttctgggtgtgcctgggatgtaagattgcctttttgccatgygaggctcttggccctgtgatgttgaagctgtgttgcccatctaacctctgctctaatcggggctgtggatactctcctgggtgcttttgttttgccrtgaggcagctgccaccatgcctggggtggatcattgagacctagctgggtgtttggactctcctgtattaggtaggcaacaggagaatctagctcattacctcctctttgaggctttcattaatggttgaagagccatctttccaatgatgcttaggaaccaaatttttccttagccctttggttctaggaatgtctcaccagctcctgtggctctgaggatgagagagttggatttaagtctagctccctctaggactttcaggagtcagagtgcaggatagaggattatacggcagcatttgttgggagaaacgctctctctcatcctggtccgtcctctccacccggggaagggacttggagatattaaacaatgaacgcggtagcactggctggtcaagaggctggatgaatcaacagggcacactcctccttacacaggcattttctattctgtagatttttcatcatttcctaggctgattgaacaaccagaaaggcagtcacttgagtagagtgagccactgctctggccagggccggctgggcagccagggcacgtctgcacccttccttccagtgctgcctggagaattgttagtagtttggaaattgaagccacagtagttgtcccgctaggggttgctttttctcaatcaaaacaacaaagcttgaagagtgtagaagaggacgggcacggtggctcacgcctgtaatcccaacactttgggaggccaagttggatggatcatttgagatcagggagttagagaccagcctggccaatatggtgaaacctcatctctactaaaaatacaaaaattgtcaggcatgatggtgggcgcctgtaatcccagctacttgggaggctgaggcatgagaatcccttgaacctgagaggcggagattgcaataagccaagatcacaccactgcactccagcctgggtgacagaatgaaactcccagtctcagaggagaaaaaaatgagtggacaagaaattgtagttttagaggaaggaaggggagtcttggaagaactttctgattctcctggggagaatggggggagcttaaaccaggagagtgagcastaaaagggtctacccccagctaggaaggcacctcccgtctctgtgggtggcaggaggagaaggggagggcacccttgtctaagcaccaccccacctctctcagcatctctcacctgctctctgcctgtggttacattgtattcatgctcagtggaggaaagctcacctgccttggggaatagtagatctcaaagcaatccagaggattctcaggaggaaacagcttaggttgcctgaggccaggctcctggktttactcaggtacacacaggattggaagccttgggttacctgtggtagtgagtgtggggctgatggcctcagatgtcttgtgaggcagactgtgtcctaagtatgagacactcagggtgcttcccccatcaggggcccctgaggggaaggtgggaagtcactggcctgggctctgctctctggagtgatggagggacagtccctggcctgggctctgctctctggagtgatggagggagagtccctggcctgggctctgctctctggagtgatggagggagagtccctggcctgggctctgctctctggagtgatggagggacagtccctggcctgggctctgctctctggagwgatggagggagcactaatgcaggttactcagcactgtcttttctcacagcaggggggtggcttcttcctggaaccagcaccstgtgtccacctgcaaatcctcatcctcagtttggaggtgccctctccctcccctccaygcacagctgtgacaggtacccaaccctgaggagccaccggtcctcaccctaccccagcccctatgctcatcggaacaattctccaagtgagtcctcagcctcattctgccaggggttggtgggtggctgcaagaccactttgggaaaggcattctgcaggagtctagaatctaaaaaaatggagacggttttctggaacacatacccaagcccagttttttagtagctcaagaraagatcttcaatttatgtctccgccactgccgctgctggcggaacaaccacggacacccagatcagaggcttgcatccttgcacaggcctcagagctgctgctccaggttttgaaaatgacagattcctgggcctctccacagaaccatggtcgatccttaggaggagagcccaggtttgagtcttctatgaacctctctaaagtgacaatgatgggcagccaggctcaagaattcctgactacaccagtgattctccaaatacggtgcccaggccagagcctcagcaccacccgagagtgggcacagtctcaggmcccaccccagactgacaggcagcagctcttggtggggcccggcaatgtgtgcttttttttgagacggagtctcgctctgtcgcccaggctggagtgcagtcgcacgatctcggctcactgcaagctccgcctctcgggttcacgccattctcctgcctcagcctcccaaggagctgggactacaggtgcctgccaccaggcctggctaatttttttgtatttttagtagagacggggtttcaccrtgttagccaggatggtctcgatcttctgacctcgtgatccacccgcctcggcctcccaaagtgctgggattacaggcgtgagccaccacgcctggccagtgtgcttttaaaagccttccaggccattccgatgcatgctccaatattaggaacactgggatagaccataaagatcccctggcctaattctctctataacactgtatatgtctagacttaattttgtctggctccaaaagaaggaaaatagctaaagaataccataaaacaattaagcaattaaagctgatttgaaatgaaaggaccttattgggttaggaagtcactgggacttgttcaaccagaggctagactctgaggcaggaagatcttatttctaattttgcctggagtaatggtttctatcgcccattcttatgaagtaatcactggtaaaaaggcagggtaaagttatatttatttttaaagataagtaattccaagtcagtgattgtaagtaagattcaatgtctacagggcatctactgataatgatgataagggaaaaagcttgggtttaccagggtatgttttcaaatacatatatttggcaataaatcttgcccctgataaccatgtaaatagactaatggattgttttctacagttaatatcccatgtacattttgttttcagtgttacgtagcttcagttattggtggtatttcactgtactttgttgttcttggaagacaccatctataattgcactttgttaccttccycccttagcctattctgacaactcacctgcatgtttatccatgctgcaatcccatgacaattggtccagccttggaatgcctgcccatcccagcatgctccccgtgagccacaatgccagcccacctaccagctccaggtaatgtatgtccaggrcctggtgcaaagcatcctgggagctctgcctgtgacttcacsctgtttccattcccataggyccttagtccttattctccttggtccctgtgggtggttgggtctttatttagaattctttattagccagctatgcccagggattgcaggtgacatgactgccgagttcctgtttgcagtctgttcgctggaaggactgggctcctttacaacccaggtgtggaatgggagctgcgctatcccatccctgaatgaaaccagggtccccatcctggttctgccacttactggttcacgtgatggacaagtcttttagcctctctgggcctcagtttcctcacatataaaaggaaggtggtaaaaaaataacccagcctcggcctgtctcctacagggttgttggggtcagtaggtagagcttaaagagatcgtttcsgaaccttttccaacaaaagctagtaaatgaaggaaatgagtttattggcttttctatggatacaggctcgaagtctttaatatatgtgctaggtaactggtaaacaatgatgactattttgttaccaacttgcaagttatgcagagggaaaaaggcttayaaattaagcaggctggtaaatgtcttacatttcttcataggatgaatataaaaacctaaaataccaaagctagaagtcaaccctcactttctagggaggaaggagggccagagatattaaatgattggaccagctcacagcagagtgagcctggaattaagtgatctygacctcaaaggcaatgcacttcattttctagaataccaaaatatgcctgcgatcttaattcttgtctagaaaacagttccttcataataagaattcaattgcccgyggttagaaacagagcaacaatgcgtaaacaagcgaagctttcaggggctccaagagcatcgccccagaagcctgcacccratcagatgacccgcacactgcaagctgttgacagaggccccacccgagggtctcagtgtggctctaattgggcatcttagaacctgaagctttcatttgtaaaatggcataaaaatctgccttgattaactcagacttgtttaaaacagtatggtgatacaacataaggtctcattattcacttgtagaaagacaaggttatttcccaaaataaaatcttaccataattgaatgctatccacttccatgtgcttagactggagaattcaatagtcatttccaccttcctcattttatgccttgagaaacacagcctataagtagtctcaggcaaagtgtaatgtgacacagctaggtaaaggcggaactgggaatggcttcctagtctgactgccaggtgcttttcttgctgctggrcaccatgctagcacacctatgtactgaacaggacaaagtgcagggaattgtgtctgtactggagttactctaaggaatgtctgctgcttagtgtttgaggagaggctggtcttcrtcgtgagaatcactgcggtggtgggggtggggtgtcctagataaaaacatgtgtacttaagcccatcctcagtaacttttgrttgagactatctgaaaagttttattctgaatgagagtgcaaaactactggtctgagtctttcttttctgttttgtktgtttgtttgacggagtttcactcttgttgcccagactggagtgcaatggtgcaatcccagctcactgcaacatctgcctcccgggttcaagcgattctcctgcctcagcctcccaagtagctgggattacaggcatgtgccaccatgcccagccaattttttgtatttagtagagacggggtttcaccatgttagtcaggctggmcttgaactcctgacatcagcygatccacctgccttggcctcccaaagtactgggattacaggcatcacccactgcggctggcctggtatgagtctttcgyagtgaaacttaacagcgctctttcatgagctctgaatatgtgaataatcttttcagtcatcttcctgatgattttgtttcttattaatagatacgacaataacttctatacatcacagawtgtgcttgtgagtcctttaataatttggagaaaatgacctgtttgaaagaagaaaactgtcatattacacagtcactccgaatgggatttctggtgtgtttttccatccttagctggcctgcagcccctgcccaggccctgctcactggtgtctttctgttgcagtcagtaccccagcctgtggtctgtgagcaacrgcgccgtcaccccgggctcccaggcagcagccrtgtccarcgggctgggggcccagttcttccggggctcccccgcgcactacacacccctcacccatccggtctcggcrccctcttcctcgggatccccactgtacraaggggcggccgcggccacagacatcgtggacagccagtacgacgccgcagcccaaggccgcctcatagcctcatggacacctgtgtcgccaccttccatgtgaagcagcaaggcccaggtcccgaaagatgcagtgactttttgtcgtggcagccagtggtgactggattgacctactaggtacccagtggcagtctcaggttaagaaggaaatgcagcctcagtaacttccttttcaaagcagtggaggagcacacggcacctttccccagagccccagcatcccttgctcacacctgcagtagyggtgctgtcccaggtggcttmcagatgaacccaactgtggagatgaygcagttggcccaacctcactgayggtggaaaaatgtttgccagggtccagaaactttttttggtttatttctcatacagtgtattggcaactttggcacaccagaatttrtaaactccaccagtcctactttagtgagataaaaagcacactcttaatcttcttccttgttgctttcaagtagttagagttgagctgttaaggacagaataaaatcatagttgaggacagcaggttttagttgaattgaaaatttgactgctctgccccctakaatgtgtgtattttaagcatatgtagctaatctcttgtgttgttaaactataactgtttcatatttttcttttgacaaagtagccaaagacaatcagcagaaagcattttctgcamaataaaygcaatatgcaaaatgtgattcgtccagttattagtgaagcccctccttttgtgagtatttactgtttattgtagctggtggtaaagaccttatccccaaaaagcattttaatctattaagaactttaatattgtatctaattagttgcaaaactggaagtgaaatttgcatagacttagtgctaattgccacagcaacttaaaagatgttaagtaatttttaagagatttactcaacattgaatcatggatgatgtggataaagacagaacctagaacatactgatgtcatcaagatgaatatgggctgtccaccctattcaagctaaagtactgtacataaaataaatggataaaaagttatcatttgtcaatgaaaagtgtggttaccrtagcactttgaacaaaatggcatttataaatatctttcccgctgctttttctcaaaagcaaaacacaactgcaatggcgctggattgggacaatttctccatctagtggcagaatccttaatgttgaccctacttccagcttagtattccaaaccttgtattccttagtattccaagtacaccttagtattccttagtattcgaagttacaggtggccagtaggttagagctgggttagtaatgcaggagtgtcaaagcggcattatgaatatactagcaacatggacattaaggctcaggggtatgatatcgcccacaggcgtagcaaaagttgttttttccaagtcagcgttgctaactttaccacttgtccaactctgacttctttggactccacttaccagttctaggacaaagtggtgtttagtttgtttgtttttgctttattgagtataaatccagagatgacgtgtaaatagctagctttttagcatcatttgtgcctgctttccaagcaggacatgcttatcgtaaattatcatttaaaagtttttcttggttttacgactactcatttggcaatacccccaaatcaggagattgattgaagtattttgggagaatacattgattaaacccactgtccaggtagtgttgggaagtagaactagttccagacatctggactgtggcttctaattgcataggtgctggttctgctggaggaggtctgggggacatttgggaaggggttaagggcaggcagtgccaccctgtgatcccagtgtccggtgatcccctctgcacagtccaccacctcactgaacccttgtccatctccacaaccctgactgcctgggttttgtattttcagggtctgttccagtgctggcccctttgcgggcatcagtaacactaatagtgtgggaataagaggaaaacgttgtcgactgagcttgggcagctgaagmgtacaactggggaacgtggccccactgtgggggctgtggggagactgagtcacatgcccctcccctgggaccttaagctctgaggttggggggaagaccattttcacatgtggaagatagatgacgacttgagagtttgagtttctaaaggtgtcccagagttcaaattctaggaattaacattttaataattcaaacatggtctttctggttatgcaatgtgggcagtggcagctgtatactggaaagagcctggaatttggtataaaaggcctggattttggtgttcatttggctgacttgctgtgagaccctaggaaagttatctactcccaaacttcaattttctgaactgtaaaaatggaggaagaaaatgcttaaccatcagggtggttataagaaataaaagaaataattgcccagcgcggtggctcatgcctgtaatcctagcactttgggaggccaaggcaggcagatcacctgaggttgggagtttgagaccagtctgaccaacatggagaaaactgtctgtactaaaaatgcaaacttagctgggtgtggtggcgcatgcctgtaaccccagctacttgggaggctgaggcaggagaatcgcttgaacctgggaggcggaggttgtggtgagccaagaacgcgccattgcactccagcctgggcaacaagagcaaaaactccgtctcaaaaaaaagaaaaaaaaaaaagatataatcttagagagttagacatcgcagttaagattctgagcccataagactccttgtaaacccagctctgtttatgaagcccttataacaaataacaagacgctgctgcacatgagaaactcatgtcaagctctcaggccacctgccgcaatttggaaggcacatttctcatgtctgttgggaaattcctctgaattatcctaacattcaggtgagtgctgaccaaaaaatatttagttcactcttgaacatggaattctacaatctgagcaccctgtctttggggtttcagtggaattgaccaatatgtaaggtgggagtgatctttaaacctgcaactgttttaatatctgtgacctgatcctattttttatttttgtattgtttttgtgaccgggtctcgctctgttcccaaggctggagtgcagtggcctgatcatagctcactgcatccgagagctcctgggttcaagcaatcctcccacctcagctttccaagtagctgggactatgggtgcacaccaccatatccggttaattttttttttttatttttttgtagacatggggcctcaccatgttgctcaggctggtctcgaactcctacgctcaagttatcctaccaccttggacttccaaagtgcttgggattataggtgtgagccactgatcctagcctctgatcctcttattatatgtattttcctctgagaagagatagtagtgatatataggaattatgctttctagaaagactttttttttttttttttttttttttgagacagggtcttactccagtcacctaggctggagggcagtggcgtggtcttggctcactgcagcctccacttcccaggctcaagcgatcctcccacctcagactccggtgtagcttggactacaggcacacaccaccacgcccagctgacttgtatttttttgtagagacggggtttcactatattgcccaggcttgtcttgaactcctgagttcaagcgatgcacctgcctcagcctgcaaaagtgctggagttacaggtgtgagccacctcacccagccaagaaaaaaaaatttgaatcgtgcatttaaaaggtgaattttgaagactatattcctacttaggaatatgggcaaatcagtatatggcatctgtacaaagattaagacagtttacttataatcaggtttaaaacagcctaatcattaaaactagaagttaatagaaagttaaagagatccacgactgtgttagtcagggttcttcggaaaaacagaacaaataggagatagatattatatatttgtacttatgtttatatttctacatatggagaggtttatgatgagaattggctcatgcaattatggaggccagtaagtcccaccatctgctgtctgcaagctgggtagccaggaaagctgtcagcataatgagtccaagctgaaaggcctgagaaccaggtgtgcagtgtctgagtgcaggcaaagatgacggctccgctcaggcagagagagcgaactcagccatcctctgtccttttgtgctaaatggccctcaatagattggaagctgctcacccacattggtgaaggtgatcttcactctgtctaccaattcaatactaacctcttccagaaatgccctcacagacacctagaaatactctcttaccaattctctgggcattttttaggccagtcaacttgacacataaacgtaaccaytgtaaaaccccaatctgttttctagcatactattatattttagaaagtcttgtgtattactaaacaggaaaattatggtgctgtataatatagatactcaacttattacgacaacctaccgagaaatacgagtgctttgatattaaagctcctccgcaatttctaaggcactagttttgagaataaaagcttatttttcttatatttatgcttataattctaatatctttcttatcattaaaaagaagaggctaggctgggcatggaggcacacacctgtaatcccagcactttgggaagccgaggtgggaggattgcttgagcccaggagtttgagaccagattgaacaacatagcaagaccttagctctactatatatatattttttaattagccaggtgtgataggacatctgtggtcccagttactcaggagactgaggtgagaggaccacttgagcctaggaggcccaggcagcagtgccacgattgtgccactgaactccagcctgggtgacacgcgtcttaaaaaaaaaaagtaattccaaagacataaataattatacatataatgagactgcaaaaatttaataattctcagtttgggaattttcttccttgatatgtattcatgtaagccaattattggtaaatcaactttctaaactcaaatcctttaaaagtgattgtgtttcatctttgtaacaatgacgcactgtaggatatagaagtgaaaatacagagatgacatcttctgatccatttagagacttgtacaataaacaaaatgtcaagttttgtctgtaagatttaaatttcctatactttcttttcggaaaccatctaaacgtatcattaccccctaaaggtatcattatctaaaacagtacttgaggctatgcatatttaatataaaggtgagtctaccgttgaggttagccattatctaaatacctggagggtaaagccaacccattatttgcacacacatcagcaaaataaaagctgactattatatgccactcagttattgtggctctttggtcaattgccatcttccaggaaagcctgttcatcaaacaaagctaattttattagacaggaagggataacattgcctctatagttatagttatgtctaaaacaagggaaaacagaaaaagctttttacagggtttgacctaggtcatacaatttaatcagatactgcaaggcggagaatcagttggtatttggtggagtttaggacatcagctctggagtggaggctacagtgggtggggtcctggagtgagtcttgatgggaagctatttcagctggcccagtttcgtcttccaggtgcaaagtatgtcctggagcaagcagctattttttttttaatgcatgatttcagtatttaacataaacagggaaaatcaatcctagtctcatactgcttaaaacagggacagaaaattctgttggttttagtttccattatacagcaaaagctaattgctacagatggtcacacaaaagacaactgcaatgttaactcttggcattcattagtagtttaattgttataaacaacaacacttgttactttggacttatacatatgtcagtagacaaaacaaataactataagagctcttacagtaataacatccaagtgttttggtaaaatagtttatgctcactacaattaagaataacttgattaacacttgagggtgaattcctacaaaataatgggtgtataatgatgattttgcacaattgcatgggttttgactttatcctagacagaaatagagagtatgtaccctcatgggtaatattgcagtttatctaaaaattttccatgcaaactaaaaggctaagtcatcaaattatatcagaacaaaggttgagacttttgctcccatgacagttcattgaaaggaataaaaagacaaatggcatagatattattatttcctcttatgtaccatcaatggtgatgaaacatcccttcaattctgacatcaaataaatataaagaagttcatgaaggcaaacttttcggcaagcaatacataacatccatgcatcaagttaaacaggaagagggattgggtggacatgaagaaactaattaacctttgacataagcaccagagaaaggaattggaaaatactttttttattctttaaatctctctaaaagataattgactgttcagcaaaaataatgacaatgcattatgggtttatgatatgtgctaaagcaaat

SEQ ID NO: 8790 - DNA, 163408 bp, Homo sapiens
aataagtgtagggttctaacttgtgatcagggactgtgcttaaatcacttattagctatgagacagtaagaacttccttagcctcccatagctttaatgtcctcatatgcaacatgacaatagtaatcacctaatatggttaatatagaaattaaagacatctgaagggcttaaaactcaaaaaatatttgttattatgattaaagtggtttggctagcattttttgtgtggcatcactttgaaaggtgctgagctggtaaccccatttcatcatctttatatgcattgtatcacttttagattgtatgcccctgcagagcatatgtctatgtgtttcatgctctaacacttttttgagtcctacgacgtgaagcaattcaggaacttctttttaagcaagtgcttgttaagcagacaaaatcttgcactagcagatctcgaactcgatctccatctctctctctcttcctcccttagctgtgctacacacttccaccatgcctcttgctctacctctaaacaatactttaaaaaaaaaaaaaaaaaaacttgttttttttcctgactagcttattaaactaattctctctcatcttttgctgtttgactatataaagagaagtctcactcactgtctctttttcaccatccaattaatctgtaatgtactgcaggctgacttccttccccactaagctactgaaatggcctctcaaaggtcacagattcctccttatcacagttttaacagagtttcctcagcactaatcttcttgattttcttttcagccctcgactctgctaactattcactcttccttgccgtgtgcctaagtgctcagacaataaacactggaggaatgcaaaccacaaagatatttcagcagcatcatttaaactgggttttaatgtctctcaattcaagtcactctgctcttagaatgtgcaacatttatcatgacttcttcaaccacatatagaagggaatatatgtaacttgctgagaccaaacgtggattctcttagcagttgtggctaattatttttgaaaaatctgcatgtcaaaatacacgcagattgacacatttaagattttaaaaaatgttacctgcttgtgtgcttttctagtgtgtggcttatgattatgtttaccaacagactaaatcagtttattctgtatttgctgtatttattaccaagaacttggagaggggcaaggaagcaagacaggaaagaaccctatgttaggagcccttggaggaaggctgacctgctttttctccacaagaggatggggtcattcaacccttcccacactgggattaattaaagaggcctctgagaagataatgaatgtggataaggatgcaggacctctgtacctgggctgctatcaatctcatcctcactaaaactgtcatcttgaggctctatggttgcctcccttcattcttgctctagtgcagtcagcttttggtaggttccatcccttccttctccctcattatgtctgagaaatcgctttttgtttaatcctgtagtttttagctgacagccaaagtgagatggatccagagggtaaactcaagggatggaagcctaccttagatgacatcccaattaatgttacccttgtgtttctgtgtagtatatccctaatttctaagttacgaataataatgaagggaaaactctctgagctacagatagtgaatcttctattaacaagaaaggcatttcttcaaaacatccagaaatacaggtgaggacattagggttttttcataactaatagaacctattccttccagattacagatttcatacatatggtagtgcctaactgctcctcctagtagtgattacttctatgagaagttcagctactcctgactaattacacattttaatggtgatagaaatgtttcaagagtcccctgtgcctgcctggattggagagacaaataaacagccaataatgtgagcaaagagaaacctagaaacagtaagaggacattagtcctactaccaaagaaaagactacaccattccagagacagaaactttctagattcctaggtagtcaccttacctaagtttaagtcagtagatgtaatgtgaaggaaaagatcaatgtaaacagtgaacttttgataggaccctgccttttcaatggcttctcttctgttcagtgtcattaacttgtccagtgagtatcagttactttctcagcatgttttccctgtagagagaacatagtgaggagcagtagaaagaacataggctttgaaagtagagagatcttgggtggaaaacctgcttcagttttattagttgcatagttgaataatgtactcaccatctctaactctcagttttctcatctgtgagatgtaaataaaaatagtacttgagagctgggtgcagtggctcacacttgtaatcccaacactttgggagtccaagacaggagcatcacttgaatccaggagtttgaggccactttgggcaacagagtgagaccccatttctacaaaaaaataaaaaatctctaataaaatttaattaaaaaatagtacttacctcatgagggtgctgagaaaatgtcatactatgcatataaagcacttaattgagagttttatatttaataggaactcaaaaaattatgtctattttgattaacaaaaggaatcatttctttgtgatattaacttattcattttggtaaacatgatatggttttgctctgtgcctccacccaaatctcatcttaaattgtattccccacatttcaggggagggacccagtgggaagtgatcggatcatgggggcagtttcccccatgctgttctcatgatagcgagtgagttctcacaagatctgatggtttaaaagtctggcattgccccagttcctctctctctcctgccgccataagaagacaggtctttcttccccttccaccatgattgtaagttgtctgcaacccctgagtcatgctttctgttaagcctgcctgttagtcaaactttttttcttcataaattacccaatctcaggtagttctttatagcagtgtgaaaatttactaatataaaacttattatttatatctactgatttcagatgaaggaatatatctgcaaagatacactgccttttccactctaccttgtacattttaaatgcaccactgaaattctgccagaaaatacaggggaaagcctatctctttaagaatatacaattatagttgacagtcaaccaccttgaagaagcaattctggattaattaacagtgacccaaaattaaacacaacagtaattagagaacaacttgatggtcccagaaagcatggtcttgggaataatgaatgcttatcattcttgtttgctatctaagtgggagttatcaacattagttacccagatttttcatcaaaagtaggaaaaatgcataaggtactgccatcaagagaaacttttaaatatttgttattttaaaacaaattaaatacttttatattcatatctatgatagaggataccttcttgaacacaaattagtctatcctatatttttctttaagcaacacatttcattaagaaaactattaagaggaaattgttttcggaaattgaaattgttggtttctttcctagagaaagaagaaatgtttcataacagggttagaaatgtaagtataacatagaactatatagcaaaccaagagagaagtatttcttcaactaatatgaatgtattttagaaatacttatgtataagtatgtatctagtctattgcattctaatatcattttttctacatataattagggaaaaatagattcatcttccacctagttcatttctcattttcaaatacattgttataagcaggcttatataccgattgatggtagttttctttaaatattaccaaaataatctgtagttgaaggtaagagctaaaaatccattccctttgaccacctctgaataccccaagaaaataatatttaaggaatttttttaagtataaagccacaacaaaccacgagaaagaagacaacagtaataaagttttagaatttctacagctgacattttcaatatctaaatgaatgttgttttcaacccagaattctatatccagccaaactatcaaacaagtatgagggcagatggaaaccattttcaaacatgtaagattttaaatttacctaccacaaactttcagtaatgtactagagcagttgctccgctaaaacaagagattaagttaagaaagaagacaatacaggatccagaaatcacaagatccaacacaagaaagaggttgaaggaatcctcaggatgactgtgaagggcaatccccagatgactgctatgaacaatgacaagaaattaaataatacagactggagagggttagaaagccctgggaaagacagactatttgaagtgtttatgtgaagagatttacatatccaggggaatatttggggataatttattattttgtatttagaaactaaaaaaagttttttttaatgagactatgcaaaaagtatcatagaaggatagtggtgaagagtataggctcttggccaggtgcgtggctcacacctataattccaccactttgagaggccaaggctgctggatcacttgagcccagaagttcgagaccagcctgggcaacatggtgaaacctcatctttacaaaaaatacaaaaaattatccaggtgtggtggcatctgcctacagtcccagatactcaggaggctaaggtgggaggatcacctgaccccatggaagttgaggctgaaatgagccaatgagccaagaccacgccattgcactccaacctgggtgacagagtgagacccccatctcaaaaaaaaaaaaaaaaaaaaaaaaaagggtgtaggcttttgaaccagactctttaggtttaaatcctagctctgccacatatactttattctcctcaaatttaaaagagatagtattaacagtgtttatattgtcatattgaggaatctatggataatctatggacatctctaagaacaatgtctatccayaacacaagagctcaatatacagtagtagttgcagtgtgtttcatgactcagcaatatgtagcatgtatagtcaaaataatataaaatcaaatattcaaaaactgaaattacaataatactgatgaagaaagatggaaagatgtttacaatgagtagaaagggtatgtgtggaagtgaagttattctcaatatctattatttgataatacctaaaagtgaaaacctccaaaatagtaatagaggcatgttatttagaagtgcaaatgagactactagaagaattaggttgatgaagtaaaaatggctcccctttgaaagaaggcatgggtagaagaaaggcacaattttttcttacaaactttgtagaaaaaaagtatttgaccccttaaacacagtgcatacagattttaaacattaaaaccagacttaaatcaaaaaagccacctgtatgtaattccaaatcaaaagcaatttataaagcagaacatagaagagaatggagacagtttcgctatctgtggagactaatacatattggataaccatatactttcagggacagaaattaagctcttttaatggatgtttcttgtacatgtcattttagaaaacatctgaccctaactgtcagccttattctctgtttggcagaacttcccctggctctctgtgtcactgtaacaggtgaataactaagaaaaaactgtgtctgtagacacttgtttataatggcattcagggtcctggagctaggctgacagatgctcctccagaaggttaatgagataaaggttcctccagctggcccttaagcagagattacacctgagggaaagacaagcagattattccagaaacagacactgctacatgttcttcataaattaacaccctcataaaggtaaaccaagaaggttatcctcaatcatctggtatcaatatataattatttttcacatttctgttactttttaatgagatttgaggttgttctgtgattgttatcagaattaccaatgcacaaaagccagaatgtatttggaaactagaagagctatttttgttttttggatttttctccaagttcaaggaaccaaaggtaagttacttaaatgtttacttttaaattgcttatctataaaatctaccgatagaagtgaatatttagaaccaacaaggctaccaattkatctcacgggctagtatatagtaggccttgaataaatattgcttgattgattgaataattaactatcagaaatgattttcacttgatttaatatttactacatggtcttaagtgcagtgaagattaacaaaataggagagatgaatgcatcctatttgctgttctaaaacattcattgaaaattcttattattaatgtaaataatattagtagatctgtgaaactaactccatttatccaccgaaattcaacaaataaaacctaaagataaaagtaatgttttaagtcatttatggtcagacaaaaaaaagtaagtatttcttaccttctcacaatgaaatcatgagttgctttcccttagaaaatagcaaacattcttcatcttcagggttcatgatgacaaccacttcaaaatttggttgtttttgaagttgtacgcataaaagaactaggcaatgtatgttcttatggcaaatctgcatctgaatatgaaattaaaataagccacaaacaggatgttttaagaaaaataatgtgtgttttaaaaaagaaacacacatgttggagaaagtttgacttttttatataaggataagcctacctatcataatatactcaatctttttaagacatttgaagtcaataaggttaagaatttctttaagaatgacatagcttcatgatgataaacattttaactaaagtattggtttggaatatccatgaaaaagtaaaattaatagtcattgcatgtgtaagtcacaaaataactgtgattccatcagtcatgttatatgaaacttctcagtgattgcatttggagggagaaaaaaatttctggaaaagatttcttcatgttttcacaatagtgaaagaagcaaaatttatttactttttcattaaattatcaattatatataaatatttacatttataaaatcattttaattagaaataaataatgagattttggtatattctgaactgaatctgatgaagtaaaccaatttgactatttcgtagacttgatcaagcaattcagctgtgttaaattttttgttacattaattctgttaatttaacgattttttctattttcatatattgcatatcagctattatacacaattccaaatatataattatatataatttttatatataacaattatatgtcatataattataattctaatgtattacatatacatataatttaatatatgtaatatattatacatataggaattgaaatgaaataagcttatcaagaaaactgccatttgttatatgcttacttctaggaaacaatgtccagtaattgcataataaaaaatcctaacatgttacttgttttttttaaatatagatttagggagtacaagtgcagttttgttacacccatatattgcacactggtgaaatctgggctttagtgtaaccatcacctgaatagggtacattgtactcattgggtaatttttcatccctcattccccttccactctctcatctttttgaatgcccagtgtctattgttccactctctatgtctttcttgtgtatacattatttagctcccacttataaatgagaccacgtgatatttgactttctgtttcttagttatttcacttaagagagcagcctccagttccatccaggttgctacaaaagacattatttcattcatttttttggctgagtagcattccattaatatataacgatattttctttattcattcattagttaacgttcactagggttgattccctatctttgctattggtaatagtgctgcaataaatattcaaatgcaagtatctttctgatataatgatttattttcctttgggtagatacccagcagtgggattgctggatcaaagggtagttctatttttggttcttaggtaaatctccatattgttttccatagaggtcgtactaatttccatttctgccaacagtgcataagcatttactgttctccacatctgttattttctgacttttgaaaaatagccgttctgacttatgtgagatagtatctcaatgtggttttaatttgcattcctctgagattagtgacattgagctttctttcatatgtttgttggccatttgtatgtctccttttgcaaaatatctgttcatgttctttgttaattttttaaaataattttaccttctattttaaatacagggcatacatgtgcaggttagttacataggtatattgcatgatgctgagttttggggtacaattgaccccatcatgcaggtacttagcacagtactgaagaggaagactttcaacccttgtctccttcttgccctcttccctctagtagtcccaaatgtctatggttgccatctttatgtccatggggacccagtgtttagctcccacttataagtgagaacatgcagtattgggttttctgttcctgcattaatttacttaggatagcggtctccagctttattcatgttgttgcaaaagacatgatttcatttttggtttgttttatggctgcaaagtattttatggtgtatatataccacattttttttttttgatcaaccaatgatgggcacctaggttgattccatgtctttgctgttgtgaatagtgctgtgatgaacttgcaagtgtatgtgtctttttggtagaatgatttattttcttttggatataaacccagtaatgggattgctgggtcaaatggtagttctgtttttagttatttgagaagtcttctttgaccacttcttgaggaagttatttagtattttctgttgagttgtttgtgttccttatagattctggatattagccctttgttaggtacataatttgccaatattttcttccattttgtgtgatatctatttactccgttgaatatttcttttactgtgcacaggcattttactttaattaagtcccatttgtctgtttttggttttgttacatttgcttttgagttctcagtaactaattctttgtgtaggctaatgtccagaagagtttttcctaggtttccatttataatgtttagagttttaaggtctcatgtttaagtcttttatctctattgggctaatttttatatacagtgagggatattggtccagtttaattcttctccatatggctatccaattttcccagtaccatttattgaatagtgtcttctttccccagtgtatatttttgtcgactatgtcaaagatgaactggttgtaggtatgtgggttctctactctgttccattctatatatatctttttatatcagtaccatgctgttttgattattatagccttgtagtataatataaatgtgatgcctctagctttgttcttttgttgttttttctatatgagctcttttttggttccatatgaatattagtattgttttttctaattctgtgaaaaatagcattgatattttgataggattgcattgaattcggggattgtttyaagaagtatggccatttcctggtgcgttggctcacgcttgtaatcccagcactttgggaggctgaggtgggcggatctcttgaggtcagaagttcaagaccagcctggccaacayggtgaaaccccacctatactaaaaatataaaaattagccaggcatggtgatgggtgcctataatcccaggtactygggaggctgaggcaggaaaatcacttgaactcaacaggggtggaaattgcggtaagctgagatcatgccactgcactccagcctgggtaacagggaaagactctgtctccaaaaaaaaaaaaaaaaaaaaaagtatgsacattttaaaaatattgattcttccaagccattaccatcaaatgattttccatttgtttgtgtcacctctgagttctttcagcagtgttctgtaactctccttgtagatcattattggtgtgtagaaatgctactgatattatgggctgattttgtatcccaaacctttactgagttcatctgtcaaatctaggagtcttttggaggagtctttaggattttctacgtataagatcatatcatcagcagcaaacagataattcgactccttcttttccaatttggaatactttatttctttcttttgcctgattactctggctaggacttccagcactatgttgaataggagtggttaaagtgggcatccttgtcttcttccagttcttaggggtatgctttcaaatattcccccattcggtacgatgttagctgtgggtttgtcatacacggctttaattattttgaggtatgttccttctatgtctagtttcttgatggcttttattgtgaagtgatgctatatttaatcaaatgctttttctgtgtctaaagagatgatcttatagtttttgtttttaatcctgtttatgttgtgaatcacatttattgatttgtatatgctgaaccgtctttgcatccctggaataaagctcatctgattatggttattgtctttttcttgtgctgttggattmgatttgttactattttgttgaggatttttgcatctatgttaatcagggatattggtctttagttttctttttttgttgcgtccttgcctggctttggtatcagggtgacactggcttcatagaatgagctaagaaggattccctcctccttgattttttgaaatagtttcagtaagattggtacccattcttttttgtatgtctggtagaaatcagctgtaaatctacctggtcctgggctcttatttcttaggagatttttttattactgattcaacctcactattcattattgttctrttcaggatttctatttcttcctggttcaaccttgagaagttgtatgtctccaggaatctatccatttcctctcggttttcaagtttgtgagggtagagatgctcacagaagtttctgatgatcttttgtatttctgtggtatcagtagtaatgttgtctttttcatttgtgattgtgcttatatgaattttcttgcttttttcttggttaatctagctggcagtctttcaatattctttagctttttgaagaaacaacttttcatttcattgatgctttttattttttttttagtctccatttcatttagttctcctttgatgtttgttatttatttacttctacctttgggtgtgatttgtttttgtttttctagttccttgatgtgtgacattaggttgttaatttgtgatctttctatcttttcatgtaagcataaaacactataaacttctctcttagcactgctttggctgtatcccagaggtatgttgtgtctctattttcgtaagtttcaattttttttaatttccgtgttaattttgtcattgacccacagatcactcaggagtaggttatttctttccatgtacttacattgttttgagttcctcttgggattgatttctagttttattccactatgctctgagaagatacttgatataatttcaatttatttaaatttattgattcttgttttgtggtctgacatacggtttttcttggaaaatgttccatgcactaatgagaagaatgtatattctgcagttgttaagtagaatgttccataaatgtctgttaggtccatttggtctacaatacaatttaagtccactgtttctttgttgattttctgtgtcaatgagctgtctagtgttgccagtggaatgttaaaggcccccaatattattgtattgctgcctcttttgttaggtctagtagaatttgttttatgaatctggttttgagtgcatatgtagttagaaatgttatattttcttgttaaattgatcccgttatcattatataatgacctgctttgtctctttttactgctgttgatttagtgtctgttttattttgtrtaactatagctactccttcccacttttggtttctgtttacatagaattttttttctacccctttagcttcagtctatgagtgttttaccaagttttttataagcagcacatcattggaccttgttttttaatccatttcaccaatttttatagttttaagtggagcatttaattcacttacattcaaggttaatattaatatgtggagttttctttctgttatactgttaactgttacctaattgctttgtagtctcagttgtgtacttttataacacctgtattgtatttatgtttgtttttatgatggcaaatattgttttttcatttccatatttaaaattcccttgagcatttctcataggggtggtctagaggtgacaaattttcttagcatttgcttgtctgggaaagactttatttccccttcatttatgaaacttagtttttcagggtacaaaatttattgttgacagtttttctttatgcagtctgaaaataggacctcagtctcttctgtttttaaggtttctgctgagaagtctgctgctaatactatgagatttcacttataggtgattagaggcttttctcttgctgattttaggatttttttcttcacactgattttggataatctgatgactatatatctctgtgaagttcattttgcaatggatgtttctggagttctctgagcctcttataactggatgtctaaatttctagtaaaattagggaagttttcctgaatttcctaaattatattttccaatccttttacttcttattttccctcagaaatacctattacatataggtttggatgttttacataatcccccacttcatgaaggctttgtcctttttaaaatttttttattcttgtctgactgggttaattcaaaaatctgccttcaagctctgatattctttctttcacttggtctagtctattgttaaaactttttacagcattttgtaattccttcaatgaattttttatttgcagacatcctatcaggttttttattttaaatatttatctctttagtaaatttcttcttgaattgtttttctgatttctttgtatttgttttcaactttctcttagagctcattaagcttctttaaaattaatattttgacttctttatctggtatttcaaagatttcattttggttaagatccattgtgggagagctagtgtaatcttttggggatcctgtaaccctctgttttttcaccagagtttcacagagtttcttcttatctgcataaactacctcttctttcatttttgaatttatttgcatttggacaggattttttccccttcaggatgtaactataatgtatgttgtatatacattatagttacatcctgaagggagaaaaatagtcttttggctttggttctgggtgctttcactggcaatgactctatatgagttccttagttgtaggtagcctttgtactaggcatgtgagcaagttcattgtctcctatggtgccaatatggcagaggtctcaggaagccagcactgtgcacttgtgccagcagattgtgtattaggttgtgcagttccatctccaggccagcaggtagtacttacttactggtaagagccagctgaagcagaagctgataggtatatgcttgatctttgtttaccaggagaggttctccattgttccaggcaatgggctgatctatggaatgcacagtggcctgagctccctcagcacctaagtgagagacaatgctgtgtggagttggactgccaagcccacccttggataccccaatggcaggcacaaacaagccctaagaggggtggcaagggaagctcccggtgaaatgtgctgaggtctccccagtgaggagagggagctacctcagctccatggcttgggcaggcagaaacacagtcttcttccctgtcatattcctggcccagctctcaggacactcagattgtacagacaccactgcctatctccaagctccaatttagccaatggccattaaaaaaaaaaaaaaagaaaaaaaaatggttgccccatggctctccactaaaatgtctgtggtgcagaacctcctccctcagcyctgttctatgcaacaggaacactgccactccatgacagaaggggagacaccttacctttcctgcaagcyccagcctggtaggcacatagccagcagggatgcagtaattcccaatagccctagaatggctgtcctccattctacccctagaatggctgtcctttattctagcaagattacacatgccgtaaccttcaggaagagcagcctgtatccacaactgtatccacaacagtgggtggggtagggagatgagtagtccccctctccattcctgtgcctcagcactgaggctgcctgactgctggggtggaccatactcttccccatagggctgaacacaacacccacatctcctctagaagcagtgyagttactctcagtccataagcgggaagctcttgagcaccagaaagcacacactctgggttcctttgtgcaaaggggtgctcccttggtgcactgcactcttttcctttaggagcagcactccctgagggctggaacaagaggaatactgcagctctcttggagtcacccagccctatgtggctrctgcaattttagcagatgctggggaatgcctgtgaggaattggcaatgtggaaacacaagggctgagatttcctgggcagaactcagtcattcaatggatgcagcccaagaatcgtgcctgccactgcagtttgggtagagaaggaggacaagcaaccctgtacatgctggtatactagtgcaatgccctcaagaagtcaccaaatcactgccacaccagtgtttgggttcatgaggacagaggagctctctgacatttcagataccaaggatctgccaccagggcaaggagaaacaaaaacactcccgctaatccttttcatgaaataccaagcccctctgggtttcatctctgacaacctcttgcttccttcttttcctgtgccctagtttcttctggtgagttctcctctaggctccagcactttcctcttgaaattctgtgtaaaatcattcaactgtaactttgagtcttctttctttttctttcttattttattttaatttaatttatttcattttatttattttattttatttttttgagatggagtctcactttatcacccaggctggaatgcagtggcaccgtctcagctcactacaacctctgcctcctgtgttccagcgattcgcctgcctcagcctcccaagtagctgtgactacaggtgcctgccaccatgcctggctaatttttgtattttcagtagaggcagggtttcactatattggccaggctggtctcgaactcctgacctcaaataatccactcacctcggcctcctaaagtgctgggattacaggcgtgagccaccccaagtcttctttctaaggagaactggcatccattstctccagttagccatactaggggraaaaaaaaaaaaaacctaacttgctactcatttagggctttttatttcataagtatcttagatgtgttagatctgtgaatatatgttaatcttcaattattgaggtctatattaattaaagttttacctcagccaactggtttcttatttgtaaccaattaaccaccatgagtgtatttacatagaaaagtgtttggggagagaaaagaaaggttcaattcaacacaactagctggtaagcataacgattgggtgtttagctaaattcaacgtttcattttaaaagatgagtagttttgaaaaaataggagatgaaaattaccaatagtagttccatccaaacacaacctatgccagcactactttttctaggtatgtgtatttaatttttacataattgcagttctaccacacacaaattttatatcagcctttttgtagttttattatgtcatrtaaatgttctacattgccatctaattttgacaagcatcattttattggctgcataatgtttctttcagtaaatgtgtcaagatttgmtttatctaaatattcaacaaaagaaaactaattgttactaattattttgttatggcaaataacattgcaataaagagctttgcacataagcctcagtatttaagactcagcataaattcactgaagtaaaattattgagtcaaagcaatgtaaacagctttatggtatttgattcatattgccaaattgtttctcaaaagttttcctatgcccttagatgactttttaccaatttgattctacagaatgcttaccatatacccaatactgtgctagatacagaatatacaatgatttaaagacatgccaatatttcaaaaggcttcttttaagttttgcagattctgaatgtagtttttcacagatacataaaggtgagatagctttgatttcaaaatattcattaaataaaattgttttagcacaaaaaaagacagttgaagagctcaaagaacaattacttcawaaagacaccaaggctcctttctttgaggttcataatggaaataccagttgcatctgatatgtgcatcactgcttttatgttcttacttttccatttcacctaaataatttcatttaattgcttgtgacattcaatgtataagagaaagagaaaaaagaaaatttacccttgccaagtcctaaaatggaaataatgtttatcttagtatgtgtcttttacattacatttggttatactaaatgaaacctttaactaagttattattagttcaccaagataggataattattttagtagctgtgagatgtcagggaatttgcattttaagacactccacttcttgccaatcctttactattggtgtatgctctcatttcatgaaattacacaaaaggtattttgcttcattgtggcttcattaacagagaacatacctgagatasctgcctaatggtaggcacattaactgtacagcccctatactttgttcatctgtgctagtctcaagtcagtgtcattcaaaggtcccagacagactttcttgttcaactgtgtctaagaggatgtccttaaagttgaaactatgtaaattraagatacttcaygtacaaatgaacaatctgtggcagcacacctgaaaccatttattagattatatatttgctttagtaataaaaaacacttgctgccttgtggcccctttaggcttgtgtcactaagggactattgcatgtgagagctaattaaacagggctgaaatgacctactactttcttagccgtttctgtttaatcatgagaatgcaaccaccttgaacatcagctgtatttgcatactaattatgtctggaaattcagattctctatacctttggtgccactatcattttcatatattttattgttttaaaataattcatctgaagcaagaaagtttatttttcacagtagtctctaggcttatattttaattgagaatacatgttgtaatgaccatactaaaagtcctgayctcctcactatattataaagtatcacactcaggggtaagtgaggtctccatccacaccgccccttyttgcttaagggtagaaaagacctctgcagtcgtggggaaggaacttgtggtaccaagccttagaaaaacacaaagcaatttgctgaaagaaaagaaccctgaccaaaatgtgagttttaatcttccacagtggacagttttcagcaaccactggacctaagttctctgtctaagaagatcatttcatccaaggctaggatttcagcctcacaaaacaagagcaccaaggcagatgaaacctgtaataaaggaggagggtgcactctgctttgagtccaacgcaacttccaagcttatctcacaatgagttgatgaggttgattggcacagccctggtaatgagaattcatatatggaaatgctgctgtcaagctctgaactagcagcagaatgtgccgctgtaattatttayggagaatattctccctctattgctcctctcttccagccatagggaatgtaagaagaatatgaaagagctaaggaacagcaatgctgcctcgaagcatatggttgtattcagtcaataaatattttcccatttacattcactcattcttgaggaaacaatgtctttctgtgtgcctttgtaaagtcatcttaattcattccgacttcattttcttcattcagccatcttaattctcttcaccatagccagcatctattttcataattgcccccaggaaaagagttaaggaaaactaaaccaaaagaaattttgtggagaaaagtcagaacctcaaaattagtgaaaagtttctgcttcagaaatattttarctacatgaagaaaataacacatgtagaactaatttgtctgtcttaagcttcctgctgcatttataaacaagtaaatgatacatttaattaagttgaactatgaaatactatgacactattattaacccattgtacccagatcagtttagacctgatcaaaacactttgcggacagtaattatgttaacaatcatttagattaacatatctttttaaataaaagttcaaactaawttgcgttcatttatggttggaaacctaaggcagagagtgccaagtaatatttctgaaatcatttgaggtgagagggttagaaccaaagttgggatgtgacctgtatccagttgtatcttacatctacttaatctattaataataatcagtccactataatatgatgagaggacttagtgtggtttttactattaactcaaaagccaactttcctctgctaacactaccagatgactgctggttctgggccatttctaacatctgttttcataactgatctcagaatagctggtcagatccttcagctctgtgctagaaatggaggaacctatcttagggtttctatttttcayttaaaaaaaaaaggtgtaacgtcttgaactcaaagaactggagttgtttattgatagtgtcattttaaatgcccatgaccaaactctaagtttagtagtaagtagcttatttagcagtgtgttatgtatctaaaggcaggacattgcttaatgggtgtracttgacacaatgggaaaatctcttcaaaaccacccccctcaaaaatatcactccctccaccccactatcaaaacactgaaatttcacctccagatttgcagtcttttcagcctctggagatataagattctgaaacacccccttttcaataatttccctgccttctttctattggatctgatcctgttatcaaaacatcagtccctcagcctctgccattttgtccgattcttcaggctattccaggcctcaataggctcacataaatcctaagtcctatatagtttgccactgaaccactctcaacagtcttcttgatggtacaatagaaatcttgctctttgacctctgtcccattggctttgttaatctcactctaggaaaacttagcttttgctttttctactctcattcctgagcctacaagttttattagagaaactcaaacggagtgttgccacaaaacaagttcctgcactataaagttagctaggccctacaagctattccatagtcatatttatatctgattccctaaactagtcccctagccagatttccaaaacttccctctaccgttgagcctgcagcatgatttcccttcattcacagaagcagtgataacaatgtagttaagagcagaagctgtaaggcttgcacagaacttcattctgcacagaacagctctgccacttactaattttgttacgttkgcaaattgttcaatctcaaatattactcccttttatggttttcttgcctataaaataaaaataataatagccaagtctgccttgaagagctaaagtttttaacgaggtatctgctacaaagatgctcaataagtgctaactcctaagatggctatagcaactaccactgttactattatcacctccttctacttactgagaaaatagaagtcatttgacttcatttgaagtatcttctctctacttcaaagtttctctgagtttatccaaacactcactctctttgtttcagagagagtaaaatgaattcatgtctttgctaatgttatttctatctacctatgactttaactccatttacaatcaatttccatgagaccttcccaaaatgaaaaggcagcctatggattgggagaaaatatttgcaaaccatgtatcttgtaaagggttaatgtccaaaatatgctagggactcacaaaattcactggcaaagaaaccaaaccaaatcaaacaatgaaaaaaaccacaaccctattttattttattattttattttattttatttttactgaagcacacctttatttagaaaaagatagaaacaatctaaatgattattaaagtttataacatgcagctatttaaagtaaaagttttcaaagactagtagtgacttggaaagatgacacaatgttatattaaaaattttacaaacaatatgatctcaattttgaaacatataggtacataaatgtccttaatttagcccagctcattataatgtcattaacatarcattagcattgtggttttagccacccccccacctatgggtttcacttaagcactcatgagtaataacccagatggagtccttctggtcaaccccaggcatgtgcaaatgcaatacccttaagagggaattttacccctcccatttggacaaaacccacagaagactcctttgtctttcttttaaatttgttatgaaatagcatattaggctgtctagccggggtgcttatactytgtctttggtatgcaatttaagccccactttgaggaagcactacatgactactatataatcacacctcacaagcagatttgaatctcttccccactgcacatcccaacctctggtgcacaagcaccccggtccccactgctacatgcctcatcacattgcatatgggttgtgcaggtctggtacttggattctttttccaacttttattttaagttcagaggcacatgtgcaggatattcaggtttgttgtataggtaaacatgtggcatggtggtttgctgcatagatcatcccatcacctaggtagtaagcccagcattcattagctatttttcttgatgctctccctcctcccaccttccaacagccccccatgtgtgttgttccccgacatgtatccatgtgttctcatcatttagcacccacttataaatgagaacatgtggtatttggttttctgttgctgaattagtttgctgaggataatggattctagctctatccatgtccctgcaaaggacatgattttgttcctttttatggctgcataatattccatggtgtatatgtaccacattttctttatccagtctatatcattgataggcatttacattgattctatgtctttgttataacacaacccaatttttaaatgggcaaaggacccaagtagttaattttccaaataagacataaaaatggccaacagctawgaaaaggtgctctaatcatcacgggaatgtgaatcaaaaccacaatgagctattacctcacacttgttaggatggcaattatcaaagacaacagataagtgttggcaaggttgtggagaaaagggaacctttgaacattgttggtggaaatataaattactacggctattttggaaaacagtatggaagttcttcaaaaaattaaaaatagaattaccatactatccagtaattcctttgctgggtgcatgcccaaaaaatgaaataagcaccccatagatatctgtgcttccatgctgattacagcattattcacaagagccaagacatgggaacaactcaaatatccatcgactattttcacatttccatcattaagtataatgcttattttagctttttttgcttgtttgttttcttcttgtaaagaagtaacaacttctttttcaagtaaagaaattttcaagtaaagaaaatttctaattctaatttgttgagtttttaatcatgaataaacatagaaatttattgtttcttctatgtgtattgagattgccaaatagtttttctcctttgattcattaatgtgataaattgccttaatcaatattcaaatattaagccaaccctacattcctgagataaatcaaactgggtcatacattgcatatacattgctggattctatatgctactatttttttttctaattgttacactcatattcataagcaagctcggaccataaattttttctcatactcgttttgtcaagttttataagagtcgtaggaaaatggaattacattttgcttgaatgtttgatagtacccactgttaaagccagataaagatattcatagaaagatatttgactactcaattttttaaggttatgataatatttaattatcctacctctttttgagttatagtaagttacacgtttctacaaatttatgcatttcatatcaaacttcaaatttatggataaaacattattcattatawcgtcttgttaacttttttatgtttatagaacattttgtagaaagtctgtagaaagcataatgttcttctttctcaattctgatattagttaattttgtcttctttattggatcaatctcatctgtttgtttacctgtttttgttatcagtattttccaaaaaagtttgacttttatatttctttttttcatttatatttatgatctctttcacattttattactctcgttatctttgttttttctaattttctttggttttattttgttttcttacaccactcttttragatggatgcataggtcattaatacttagcttttcctttttctaaaataaacattttgatgatatcattttaccattaggaactgctttartttcattccacaagttttattacatagtaattttatcatttcagaaaaatactctctaataacgataattatttcttctttgacatatgggttattttgaataatttttttcaaatacataaagattttccatttgtttttcacactaatttctagcttacttctctattagtctgagaacatgatgcatatgttatcagtccttttcaatgtattcagatttgaattttagtacagtatatatccaatgtttgtttattttccctctgcttgaaaagaaggcatattttatagcttgtagatatgatgcctcatacatgtccattaggtcaggcttgagcatgtttttcaaatcttccctacccttactgaatttatttgttcattccatcaattaagagagatatcttaaaatgtacctactattatcctggattttattttctgtattgtctatcaacctttgtattatatatttatatattattaagtgcatagaattttaactttctatgacttttaaactgttatcattgtgacctgtctgtctttgcctttgtaatgtcttctgcctaataatgaactttgtccactggtttgctggaactggcttgtactaacaagagccaattggccacatcttttccaaactcagtgttcagttatgtcacattggtggcttgaaatcagtcatgaaagagtattaacacacagaaagcagcagatgagacaaatctcacccatctcccagagctggttattaatatttaccagcaaygctctgacttcatttgattttaatatatcagctttcttttgattagtgttcttctattataacttttttccattcttctcattttaacctctgtgtcttttgatttaaatatgcctcttaaaacagcaaatcatgggaacctttttaaatgtagtctgacaatcactgtcttttaacaggtgcgtttcgtccatatgcatctactatgtcccaaatattccatgggacatacttttactgaaaatttatctgaaatttaaatttgacttggtcctatatttttatttgctaaatcaggcaatccaattcctaccaggcctagcactaaacctcagaatggagtggcactagatcataataacaggtaacaatgtgccaggctctctgcaaaacagtaacatctattttctcatttaattttcaaaatacaactacataataagcaagcactaatcaaaaactatagtgttggaaatattattatctacttttcaagttacaaaccagagcaaatagaaattaattatttgcccaaattgaggaagtggcagagtgctcttcctatgcttcagtctccaagtacccaaaatgaagtttaccttacttttctgcaggaactgataggtccttatccatccaaaagttaacaggcaaagatatacagctgtttctgtttgatctgctccaattctgctctgcttgagtagttagaatatcattctttttttgtaatatatgcaacaatctatatatatgcaattgtctttactgagaattcccaacatactccaagattaagtttacatgatagcaataaaaccaaagagtagtgtgtggtttgtaaaattataatcatggacagcacaaacttccagaaaacagagatgctgggctaaattagagccgactctgatataagtacttcagatatgataggaatcggatgayacaaattttgtccccaaatatgtagcactcttagcaatcacaggaagaaagataccttgtgtttcagcacctcagtacagctggaaccagaagtaaagtggatatttggcacaaatcattatgtctcataagtaaatccacattcctttcccctaatatttcctcagtacacctcagcttctgaagttagcttcctcctgaattttttggaatttgttttataagctcttagtgggtctctgaattcttgttacttgttgtccccatccacctccaagtcagcttcaaatatcatgggctgaatcttcctccggctcatgcattacctggcactttctggcataaccccttggtttccaaactttgtgtcaacctaggctataacagtgctctggaaagcatagtgttgctcacatttgtgaggtacaatcacaatctcagatttacttgtacaattccatgcagattctcttatggtaacctgtgtacttatttaaactccacattctgaaacttatggagatggtttccaaaaagtacacataattaagaattgggaggcagagcagtaaaaaaggttagtggaacttcagttaatgtaaagatgagatgattaggagtggcttaatcagcctgaacctatacatgtgaggagatggcagcaggatgatggaggggtatggaaaagtccagctgcaggagaaaggactggtttatttgtgtcagcccctgaaaactaggcagccatgtatgaaatcttcaccaagctggttgacaatcttagtgtaactgttcttacctcagtttcacattctgtttactccaacttcacctcagcattaatccaactctattcaccatttttttcaaagtgataatgcattttacaactaatcacagcttataaaaatatcctactctcatattttytaagattgactcatctgtagagaaaggatttgttgattttgtttatgtattcaggtggtcctcaacattttaaatgtttgctaaaattgccaaagtaaatttagtactccatgaagaagcaatgtgttgatcctatggtttctcacaacccctggcacagtactgcataccttgagggcgcctgtaccactatttgagaggcaaaggcattcccccattactagaagtatagttctcaacttgcaggaacagcacctctgcaggtggcagctaaatgttaatgtacgtcattcgagaggctgcattatcaagtgatttcatgccttaaatggaggcagtgtgtactatcttttcttgcaatgtgtttctctcctttcccaggacacagaaactagtcagctttgagaaagaacactcctcctcttctcaatatgccctgccctctcaccctactaagacggatgatgagtttgcacacatttctgttctgggtacagttgaaaacatggccctgctagactcctacctcttcactccctgacatttaccagacttaaacagctggcaattccacctgttcagagggtcatcccctctgggcacgaaagaggcaacttccttttccacctctcccttcaacttcagttctgttcctacccactcactacactgcataggccctcagcaagaagtgcctatgtttgtaactcagcatgccaccaatagatttagttcttccttttctttctttttttttttcttgtgtgtgtgcaatgaggtagggctcagtacatatgtacacgtatggaatagaaggtaggcactagcaacctcttatttcttgtaagggtttgccaaggtcctaaccatttccttctgacatagcaagtctgatggttaaacctgatttttgcaagaagagaaaaaataatgcaaccactctaattatttgagataagagactgctgatttttatcctcagcagggattactgctgctgaacaaatgccagtttgggaggtaaaaaagacagtgatggcatccaattttcaaaagctacagagagggaaatggtataacatccaccccatgcattattgataatcagcatgcatgctgattgtgaaagtctgtttactttctaattcattaaaagaaataactacaagtttccttactttctatgatcttcttttgcatcatttattccaacaacttttgcctctaaggccacagattggggctggcattgtataagtttgttgagaactacctgtaggagggcaagtgggacagcaagttgtagaagcttctctgttctccattttattgcctagaaaacagtatgcttaaaatccatgcagtcttctgggatagactgaacaaggtattcagaaaacctgcataatttgttgatacatattcaggtatgttaagcacgatttgtatttaattgcttttgctctttgggaaaaatttctcaggtgtgtaattgagaatctactaatgtagtgggaggaccagggcataatgaatctcaaacaagagaaacatttgcagaaacaccatagtccctcactttttttagtaaggttagaaaaatttgggaaagattaaattgtgttttttttttaacttccagtcattgaattggtgctgaaatgttacctacttactctctatagagttctgttcctcaaattatgatttttgttctgtagaaattacagtgaattttgtctctggtcgtgctaatttattcattaagacattgagaccttttcccctaggaagacataatgggtttgctaagtgcttataccaatggctgttgctttcatagcaatgctaccatgaaagcctgattctcttatccctgatgtctactattgccactgtatgtgtacagtaagcctctgtatgcctacaaggttaaatagctaaaaaaaatttcctctagaagagtttggtgaggaatggtccaaacaggttggtaagtatccacttgaatatgtagccaagaaagagaatgacttgtgggcaaagctgagcctgaaatagaaactttgtaagcagcctatgtctagaagccaactttggtactggaaggaaaaaaataataagctcttcagtgatatgacaaggagatgatgtrgcctatgtcttcagggatgccagtcaacattgtggtcacatggccatcagccttcaacctagagtgaaaatggtactttgaccaaagggctggctttcacagtagctaataaacatgcttaggtgatccaaacctaattttttttttgaaggagtctcactctgtcacccaggctggagtgcagtgtcacgatctctgctcactgcaacctccgcctcccaggttcaagcgattctcatgcctcagcctcccaagtagctgggattacaggggtgcgccactgtgtctggctaattttttttatatttttagtagagatgggttttcaccatgttggccaggctagtctcgaactccckgccttaagtgatccacccacctcagcctcccaaagtgctgggatttcaggcgtgagccactgtgcccggcccaaacctaatttttaaactataaacgaagagtcaaaagcccagtatttcagaactgccactcacatccttgggcagatttgactgttttttaggataaagtaatgtttgaaagtgtttaaattcagtggttgttcctttaatttccctgtctatatattcggaaatttccaaaattatcatagttacactgggttgcagaatctaggtcagctccaggatagagtggctaaattttaaaaggaaaataaataaataaataacaccaacctccccaacttaagccttcggtgccaaccattttccttagtctgctagaagtttccctgcccaccaatatcttgtcctcctttatgcccccctaaatactttctacctgccaggtctttcataagaccctcccagctcaagggagcccatcctactgtgctagatctctgccttttcccaaattgtctgttttgttacaaaaccaccaccctcaccaccacccctatcaacaaatgtcaatatccaaattcacagaagcgatcagtggagttttagtttacygtcactttctgtatattgtgtgttagatagtcacaccttctggtgaagtgtcatatccacacattgaatacaccaggctctataagcacatcacaaatactaaaatataaagagaatgaaagagagagagacagagagagagagaataaaggtagggggcaggtattggtatctatgcatgtggtatcagaggaaatcttcactcactaggaccttgcttttgtcttggaaaaggagggaaagacaaatctttttttattttaacttttaggtccaggggtaaatttgcaggttcattayataggaaaacagtgtcatggaggtttgttgtatagattatttcatcacccagctattaagtctagtatcctatagttattttttctgatcctctccctccaaccaccctccactctcygataggccccagcatgtgttgttcccctctgtgtatccatgtgttctcatcatatagtttccacttataacacgtagtatttggttttctgttcctgcattrctttgctaaggataatggcctccagcttcacccatgtccctgcaaaggacatgaattcattcctttttatggctgtatagtagtccatggtatataagtaccacattttctttatccagtctatcactgatgggcatttaggttgattccatgtctttgctattgtgaacaatactacagtgaacatacgcatgcatgtgcctttataacagaatgctttatattcctttgggtatatgcagtaatgggactgctgggtcaaatggtcaaatggtatttctgtccttaggtctttgaggaattgccacaccaaaaagccagatctttttaaatagttttgcgtcagtgtaaacagaaaaatgagctagtatctggaggaaacatgctatagagagaggatttttttaatagaggtaaaataatagcgtgtttgtgtgcttctagaaataatccaatagcaaaagggaaaatgatgtaggaaagtgagagaagagtttctggaagaatgttcttgaaaggtgaaaaaggatgggacctgctgcctaagtggagagttggtcttaagtaggagcacagacmaatcatcaaatagtcacaggaggcaaagcatagactatgatcacagacgcagccagtgakcagtgagcagatgctgtgctggatgcttgggaagttctcttctggctcctcttgttttcagtaaaatgtgaagcaaactcatcagctaagagaaagaatcagcaagaaggtaccagaaatctgagaaaagtgtgtagctccccaggacagtacaaaactgagtcagactagagaaatatagtgtgattttacttaaggaccagaaatttaaagtgtgttctaatgcttgtttttctccagccatgatcagctatacaaagattcaggtaaggggtaggcagtgggttgaatttaaccatgattatggctttgcctgtcaagtacaataattgaggggcaagggagttgccatcctcaagagccaggtaataatgatagtcttcctcattgatctccacatatttaattggtyccattgattatttacttatggaaagattgaaagtgtctgggaatgcagattgtactaaaatatactttatatataaaccatctcttttctggtcttttggtgtttatttagaaaagaatttttatttgccttttcacttaggatattatctttaataagatgactgtgtcctaagcctctgatattagatacttaaaaagaggacagaaatttcaaagaggagttgcaataatggatgcgggcaagacatgaagcattttttcatagtctaatggtttttaaaacaaatctaattcatatatatattctaaaaatcccattaatatttccacacacatttttcattaattcacttaattaatatgtattgcatctctgtcatgtacaaaacattgtactaggcaagcaccaaggtgaactggagaggggagggcaagattacaatacagatcccaaaggtatttgcagtctaaagggagaaactcatatatttacaacaaattagtattcaagacaggacaaaggaagcactacaacacaagtttcatggcatttgtttatctcatttacagctatgtcccatagtggacctgaaacagtagtcgcttagtgaatacaggtgaatcagtgaatgccatagagatatgaaccaccctggaggaacaggagggagcaatgaatgaattctgaatgtgggatctgagaaagcatagtggagaatgtaacatttcactggctcttaaaagaaaagtaggaaaacaacagagaaggaagagaagggccctcccatatgaaagacaaacacaagatgagcactgcagtgtggaagcaggaagacttcagggcatagacatagttctgtctgaggactgaggaatagcacagtgaaagggtatgttagaaaagaagagtggtagggcagagtgggaataagagctaagctatgctggtaacaaaaacactctatctaacccatgacatattaagaaaacttgtgaggtgcatttttcccacaaaccagttctaaatatgtctaattttacactgtgtgatttcatgctattgctgatattttattttataatttttgtaggtacaggttttcactgatttataaaatgttattctactgactaatgaaaattttgaataaagctttagagatcttactaaaagaaaaggggggtaaggaaaggaagagtgataccagcaagtgaaatgtctcgattatctgataaaggagttcttattgagygtttacactgtgtcttacactgttttagctgctgcccatgttataactcatttaatatcacagaaaccctgtaagggaggtattattattccccattttataggtgaagaaactcaggatgtacttggatgtcaagtacacccacattatacaactagtgacagctccaggccctgtgtaccattggttctatgaaaacattttgaatagttgagtgacattatatgatttgtgctgctactacctttttmtytcataagtaatgaacatatttaagttaaattcagaaagtaagcaccatgtgtattacagctgttcctcatctgtacttagaagttctgaatattcaaatgtattactttccatttctatcttttctttattcaatgatatgactatttccaaaacctattggcttaaaggttgttttcctagtgtttaatctataatttaaaatagtayaattatatttttttcttaattcataatttatttaattaaactgttctaatattattttactccaatacgctttttagaactacctaaagtagggaaaatataaggaagtgtttctggaagtagctgtagcttggtgtttgctataccagagggcagaaataggactgatatatggaagttatcagaaagtaattttcaacttaaagtaaaggtggttatttttttttttctgaaatcactttgcccttctctttgtaactttgaattttattcagaaacagttgttgatggcagccaattcatcatcaagtaggttacactcattttgtcatcatcttagagatttcctgcctcaaaaaaatttccagtcttttattaaatatactctattttgtagcaagtcttccaactatcaattcattctcattaaattttcacctcctcttttcaaatacttatataaaccaaaaatatcaaactcataaaagtgacccaaagaatctttaaaagttcagttcagtaacaacattacaatttatgcaggactggagaacagcatctgatctggtctaattgccttactcaagggtgctttcattagctccaacaactatcagctctttttatttcactgaaatctgtaacaaacagactttgtcactgtggcctgtcatccttggactcaagtgatcctaagttcctgatctctcacctcrtctctagtgaggatggggcagaggcatagacaaaagattytaatcccagctcaagctgtagcatcatcacaggggggttctctgtggttggttttgtgtyacagaaacagagtagtcaaggtatctaatatttgtgttataccaaaaaaaaaaaaaaaaaaaagatggaggttgtttgttcagccaagagaacctaaagtaggaaaaatatgaggaagtgtttatggaagtagttgtagcttggtgttcgctgcaccagacgacagaaataggactgatgtgaaagttatcagaaagtaattttcaacccaaaggaaggaatttgttaagtggagatactcaaaartggaacatggtacatcctagaggaaagaaacaaccatttgtagaacatttgtcttgggtcttctccagcaggagatatttaaaactgggtgaccttataatttatttcccaaacagggacacatttgagaatgaaagaataacagctataaactggggtatcccaggcaaatgggttcacattaccctaattcacccttgtagacccccagctgtgtgtacttgctgacatgtggagaatagggaaatactgaccctagtaggggaaagggaaaagtgggagctcatggacgtgctgagaaacagggcaaatctgtgaccttctcgcccctgcttctgcacctaccccgataggataaaacgtaaagacccatatcaaataggatccctgtcagtgaacctggatattaacaaactgttaggatccaaagggatccacctgggaaaaattccaggacagcatcattgttcccagagccagggtagagtagatactcttcccaagtcaagttacctaccctgataggatgaaacctaaagactcatatcaaataggatctctgtcagcgagcctggatatgcgcaaagtgttaggatccaaaaggatccacctggaaaaaaattccaggacagcaacattgttcccagagccagggtagagtagatactcttcccaagccaagttactcatagagttctacagggcataacattaggcagtaagaacaggaccagccccaaaggaacaaagactgtggtgatgacaaggtacggaacaggaccaggccgatagcaggaccccacacattacaggcaggcacagtgagaagaatggagaagggcaggcatgtaggggcacagtctccctaaatatggtctgtgttacactgcctagacctagaagtacccaatgaggcagctttttcttccattctaaatggcaattcaaatataacaaaaacttactttttactatgacaagtttattgcaatctataaactgcttgaaaggattattaaaattaatattcctaaacaaaaattcacattttactaactgtaatgggtactaacagctgtgtgctcggctcctatccctctcttgcactttgcccctagattgaatgggcacctttcactttgccatgcagccattttgactcacgaaaaactggttccaactccatggttagaatgagccacttcaagtaatcccagttccctgccttgtaattattcagatcaagccgatagcactggcatatgccttgcaactggtcttgctccaggcacatggcttaagtcagccaaacctaagggaaaggctatttttcaacatgaatgagagtcaaggtggtgatccagttgctgctggccatcatcaggggaatttgatggaagcctgcccgaggatgacatcaccacatgaagggacagaaccagacaagtcagagccagacctccatttccaccaggcattccctgcctctggctttcctttggaggtgacaactttcttactgtgtaagccagtttgagatgcacccatcttgattctttatctggaagcatgttagtagatctataaaatagtgattcccaaacctgcctgcatgttgaaattacccaaggattttcaaaatttgctgatgcccgtattctacrcagagattatgatttatgggtctagtgtgtcgctgggtgagccaattaatctataaatttcctcccttcctggagattctttcctaagaatgtacctctgcccaagaggaaccagggcactctgagacttctcaaagtgacaggaatatgtgttcccaggcggactttctccaccctctacaatattgagggacttttatgctttacagcaagatttaaattgctcttcagctatcctgcttggattccccttttatcacatttcagaagatatgggtttgagagccttccctagtaaaatgggattataaatctctataagccccatgtttggagtctcaagaggccatagtaagaggtcccaactgttcatcggtawttttttttttaatggtagaatggataaaaggaaagagatggagtagaagaggaagaattgagatctgactacactgttaacactctctgccactctctctttccttctctctctctttctcccaagcccaacatcaaaaactaggtctttctttcacatttatatgtaacttagatcttactacactgttaacacacactgccactctgagcctcagtaccctaaatgctgatgaactgagaaaaatgatatgtttcatcgatgtagtaaagcttttgtgaggatatgaggtaatacatataaaaattcaaaattaaaaagtgtttgatgaatctaagttattatgagaggtccagaaagttaaaaatgcagtctagacctaaccctaatagataccagccatgccagcaggatgaaatggcttagaagagagttacattctctgccagcctcccccttgttgggaagggtgaagcctccccctttatccttcctctcaccatccttcatgaaacggcaaagcttgtactataaatgcaactataagatacatccttgctccaatccactctcagccagattgccatgctctgagccctgcccatatagaattcctagggctaccactaataggcaggaaggttattttgttgcattgttccgctaggtttttagaagcactccacttcctcaacagtacacctctgggcaccacaatgctatatcgttccctgcttgaattatattatctatcataagagacatctcttgagaggcttgagtgctaagtggggagtgatttttagaaagatgtgtgggaaatggtttcaatatttggcagttcctaaaggcaagatgatttgagacattggctttttaaaaatacgcttgatcggctcattatactattctcttatttctgaaaatgccttgtcatttggaatattacgtttagcagttgcaccacggtagaaatttcataaactaaaggattataattttcagtttatttcagtcatttatccatatatgtcacatataacacataaatgtatatattcaccaggatatcaatctttcttttacagatatctccattaacatataccattctgaaactaaagacatagacaatcccccaagaaatgaaacaactgaaagtactgaaaaaatgtacaaaatgtcaactatgagacgaatattcgatttggcaaagcatcgaacaaaaagatccgcatttttcccaacgggggttaaagtctgtccacaggaatccatgaaacagattttagacagtcttcaagcttattatagattgagaggtaaggaaagagatgaaaccgtttagccttgtgttatttccatcccttccctttcattcatccataggttgtctttagcctaaaacttccagttctgtcatttagccacaagaattataaaaatcaacctagtgataatctgatagtaatgaataataaacattcaaaactatggtagatatcagctcttatggtttaaaataatatcttgtgcagcatagaaccaatagggcatttagaaatcaccagaaaaccttggcatccagattttacccctttattttttatttttgccaatgctcaatattccattttaatgttgttcatatgggtaagaagtacaggatgattgcaatgtcaggaatctaagcaaattgattcatgacttaagatttcatttttcaaaagcaacattacaatccagatcctcttataagtttgtgtattgatgatccagcagaaacttttaaagtttggaaacctagaggcacattgaagtgcagaggagaaacaaataaagagtggttaccaagatataatgcaagagtgttagcagaatttacaacacaattacagtggtttccagcagagtcacagtccactttttaccccaagactgcttcacaggattctgatggcattgccagaaaccattaaggagttaatcacagcacagccatcagtgactatcttttcactaacttcctatggatgacaaaattctcatggcttcttttttaaaagaaaaaaaaacaaatctttggtagctactattaaaattccccaggtggctccaaataatgcaaaatatcttgtctctctgagtcttaaattcaatttatcttacatgcgaaagttgagagttttactgatttctatcttgatcacactagatgtttgcttccattgcaaaaagcagagccaccctgctttatttaaagcccatctactggagcaagcttgttcaattccagcctgtgatgtgttgtacactatgacaactgagtacccatttcacaataccaacatccagaaaacttcttggatgtctatttttgttagatgtgcccaagttaaattaatctgaagagttattattgggttttggaagcataattaactaacagtttcaaaaatatcaagtcttatattccttatgtgtctcattttctgtggaagtaaaaagatattcactttctgaaagaagccacacccatagaaaagtgaaaactactggatcacagtctgaaagaggactctcactgtagaaaatcaagggcactatattactattctaaggtcctagaagggcatctccacagagcaggtactagccaatgcttgttggtggacacagaatgcaaagagcccattgggaaaatagagaaaagacagtgacatgagtaaattactaatttcgagtgtgcctacacattgatcagataatgaccctggtaaattccatatcgtttgctcagggatggacgtacatacagtatttgcatcacactgaatatgaatgcaactattcctattttcacataacttctaattctttacaacattcacaaataggattcactggaagtatttggaataccctatttattgctgcaacaaaatttttagctctgaatttttattctcagctctttattcttgattaggttgcctctttcattcttgtttccctggawgaaacaaaccattgtttttctccccacagcaatgacagtccattatctttatggctgcccctaggtaatatgaaattttactattcatcagcatgggtttcttaagtcgaacaaattggttcacaaagaaacaagaaataagacccagctacaaagcggttttcctctgacagagagacccacttactgttcttgttgctacttttacaaaattatccattgacatctttcaaacttaggagagaaagcactcatattcccaaatcaaatggaacattgaattattycatttcccagggcttaaaagcaacgcagtgaaatgttctgagctttgtggtagaatcataaatgtgcttatctcaaagcccaaatgcaaaagaggcaagtgtgtttctgctaatctacaggctgaactctgtgccccagccaaatttcctgctatacagatgcctcccttcagatccccgtcacctcacctgtgtctctccctctatttccctccctctctgcctcccatacccaacatcaaaagctaggccttggccaggtgggtggctctcacttgtaatcccagcactttgtgagaccgaggtaggcagatcacctgaggtcaggagttcaagaccagcctggccaatatggtgaaaccctgtctctactaaaaatacaaaaattagctgggcatggtggcgcacgcctgtaatcccagcaactcaggaggctgaggcaggagaatcgctcaaacccaggaggcggaggttgcagtgagccaagatcacgtcactgcactccatcctgggcaacatagtgagactccgtcccaaaaaaaaaaaaaaaaacagctagatctttctttcacatttaagtgtgccttagagaaggttaaagatggatagggtcctagttctttctactccatgttgtctgcagatcaacagcatcaccaccacctggaaacttgttagaaatgcagaatcatacatcccaccccagacctactgtcagaatctgcattttaacaagttccccaggtaaaattcatttgtactttaaagttctagaagcactaatctagagaacatctagccaacactcccgttgtacggataagaaaactgagatctgatgaagtaaaatggcatgttcaggggaacagctggcagcagaacgggggtagaactcagtgtcctgattcccatttcagtgtgttatttcaccctctaatgtgtgcacaaccctgtactgtgcattttcacataccattggtctaacaatactaattgcgaataactgtctgcaggccaggacttccaattacagactgccatgcctggcctccagggtatgtgctccctggggttcttcctrcatcatcaaatgacttaggatatgacctttgacagagaagctgatgttctgtgatcagatttcaggcattggccggcaactgtgggaagactggggtgggagtgaggccaaggtgctggatttctctagaatcactgtggcagtccctcccagcaggttcaaaggaggatagtacagaacaggtaaatcaaaggtttacaaaaatccaattttgagaagttttcaggtccctcccagccctgaggtcctttgatgcctcaattttcaagggtttttttgatacttccccagtaaggatgggggactatcctggtgggtaagtgggctggtgattccaatcatggaaagagtctatgcctcctggcttgtgagaagcttccaagagaaaaataacatcagaggagccacaaaaaaagaaagcctgcccctcagaaagagtctgagatttcatccttaacattatgattcccataaactacaatgtcacagggagataatttttcaagcaacttcagacattatgctctagaaagaagattctttcagggcccttatggaaggttttgagtagttctgtgtcctgtggtaggagaaagaacakcagggaaaggagcagaactaggaagatgcacacaacaaaaatagtacctcttatttgactgctcaacctcagtccccgcagccatatgacagggactgcctgcagaaatctctgcataactgatgatgcatcctcaggctacatagcacccaggaaaatgaacttctgtatacatctgtctrcatcagttatgatgcctgccagtctgagtttgggctcaactgggagcagctaggctcaacgaagaacacaattagttcaagacttaaattggaatgaaataaaagcaagtcttaatckgagaccaaaagcracacactcaaggttgtgcctaacttgtaaacagaagagattgtcacataatatcttccccgatgtttcacacacagatattgtccatgaaagtcaccaacacttagatattgtccatgaaagtcaccaaagacagtgctagtttattttatgtattgttgtatctctgacacttatactggttttgaattgaagtagccacaaaataacatccccagagagagtgtggaatatgtaagaaagaaggctagcaaaggcagctggtttgcttagactggacatacaactgttagggtctggacaaatctgaaaacatccaagtgttgtttccttcttgtatattatgtagactattgaccagagatgaagggtcagagacggcttgctggtttgtatcagaaaaggcattaaaacttcttgatccttgcctggcagtagacagttcacaaaaatgaattctgcaaggtgaggtattccattgcttcccacgtgttgacaccctgttatttcccccagtgtgagaaaccagatggcacatttgaggtggtcaggactgcaccctctcctgtctttgtgggttactcattaaaagatcaattaccttgaaggttctggtcaggttgctgctggtaaatgacctgagcttctgttgatctggaattttcttcttaaaacagaaagstaagagaaatccagacatggaataagtggggaggaaggaataacatataggcataagagtctccagattggtctcgtctcaccctattcctccccacggtcctttttctcagcacagcagtgtttctttaagtgtttcttcagtaagtcagatggtgtcagcctctgccctaaaggctccaattgtttccattgctctagagttaaaaatcaacatattacaaatgcttatagggaggcttccaacattttttgctctcttaatcccctaaaacaatttttagctatataatcccctcgcatgcttttccattgacatctagtkttttgtcaagtttaaattaataaataggatgtaatttttggtcaatatttaccatcaaattcttttaacagatacgtgagcaaattcttcttaacagtaggaaatgtcacatggttactttttctccacacattcacatttccattctacttttctcctcagagtctcattttaatgtaatttatgtttatccttgaaaatttgttattgattgctctaaaatacttttttgtaacaaaaatatgaacataaattaaaattacgttgtttcttgtgactataagatttatatgtaaaaagaaatttcttctggattcagttgcatttatcattttaaatatataatcaattaaaactaaacacatatagttttagtttttattgatggatggatatagagtgagattcaagttttgtgggtgttaatgtttgtaaatacaaaattgcaaatgcaatattctaaacagggctttggaagaaatcagtgttaaaaaaggatctgtagcttatgcttccttagcttctgcctctggatcaaagtgattgctttggttttgctcctctaattgttcatatacaattagtcgttatttatattgtgcattgctaaaatgagacaaagtttaacatcaattttatccctattattttacttagtttcagttaggtgttgagaaaactttaacatcaattttatccctattattttacttagtttcagttaggtgttgagaaaacttctttacataaataagtagatgggaacagatggagttttgttacagcactgttcttattctttaaattcctttgtcattatatgccaataatcacatcatgatctgtcatcattatttttaatgatctatcaatcagctgtcaacctattaggactccttttaatttgttgaaagcaaagaatcataaatcacctagactgccaaaatgtgtgttgtccctcaactcagttcactccctttctcaaactcagtattgttaytgcaaattgctccttggtgtgataacctagaggcaccgtgccacaataagaatagggatggatgaatggggaaaggattgtgatcaaaagggaagtactaacaaagaggtgtgtctttagagagaccaattttaggaaagcctgcacaggaaaatggacacctggaaattgattctctttaaatattgtgtgcctgctcatcacttggaaagtcttcaaggacagccaggggacctgcactccagtttggagactgctggtctgcaaaaccctacacaatctgtgttcaccttgccacatytttctttttttttttttttttttttttttgagacggagttttgctcttgttgcccaggctggagtgcaatggcgcgatctcggctcaccgcaacctccgcctcccaggttcaagcaattctcctgcctcagccccccaagtagctgggactacaggcatgcaccaacacgcccagctaattttgtatttttagtagagacgagctttctccatgttgaggctggtcttgaactcctgacctcaggtgatccgcccacctcagcctcccaaagtgctgggattacaggcatyagccaccacgcctggccctcgccacatctttctatcttcatcctctattactctcaaccttgctctggccacagtgacatcctccctgctccttcagtgcccctagcactccacaaactgggagactttacttttcccaaatggctcaaaagtcacctttatagtgaggtcttcctcaaccactctattttaaactgcagttttrcacacacacacacacgcacacacacacacacacgcacataatattccctattttcttgctttcctttttctccatagcatatagtaagtactcaataaatatttgttaaatgaattaacttttagagactgtaaattagtgtgtcgacataagccatgaaataattttccatgttattagactttgcttgggattgggtacggggaccctcttagggcatggccattaatgactctgtattacagtgtgtcaggaagcagtatgggaagcatatcggatctttctggatcgcatccctgacacaggggaatatcaggactgggtcagcatctgccagcaggagaccttctgcctctttgacattggaaaaaacttcagcaattcccaggagcacctggatcttctccagcaggtgagcctaaacaccacatggttatttggaacactgcacraacagttcccaggctccagcccctaggccttttgaattggtttccacaacgtaagggttaattgaagaagtgcttggaggtatctgattargccaatagaaattttattcttgcaaaataatatggtacagtcaggttgaagtgtaggttaagggagaagggaatgaaaattgactttaactcttcggttggcattatctcctggtaaaattacattttatctttatctttttgcagagaataaaacagagaagtttccctgacaggcaagtacccaaaatagagtgtgtgtgtgtgtgcttttgaatttaaaaagatcatataatggagtgaaactaagctattctacctgtargattttatgtcagccactaagagctgtgtagattattctgacagacaattcctgcatataatgtactgaagataaatcagtacataaaacaaaaataaatagaccttatagatttagatagacatttgcattgtttgcacataaaatgaatttattgctatgtgatatgtatctaatgtgcaccttcacttataagaaatagagaaattaaactagtttgatttttagaatttatggtaaactattagttacatcaagaaaatatttaatacaatcaaagaacaacttgaattttgaactctcatttggtattctgtgaagtgttaataactctgaaactaaattactaaagctctaagttatatcctcaacaagaactgaatatcaaataagaaaatcaaaaaacaaaataaagagaaaaggaaaacttcattagattaaatgattaaagaagagagatgttgtcaaactctaaactcacaaattacatacatcttatgacatttagaagtctaaatctgaagataatactacaaagagagacgcaaatttggccatatgaattactgacaatactttacaatgccttacacatttatccctttgtttctattccctttgccactaacctagtctaggaccttattaatatactctgtgaaaaatgtctaatctgatctccctgacagatttccttgcttctaacctcttctcctcaacttgcacaactgctgttagatttatgtctgaaatattccttttattacattgagycttgttcaatggctttcaaaagattcctacatcttcctcttgccattctgaatatccactcccaaccttttccagcccacctccgtgtctgtgtgcaggaggctgagtggtaagaactgcatcagtggcatcccttgcctctggcttctggttatggccagccagtgaggaggaagaaatcagagagagaagagaatgctggcagaaaatttacacacacacctgcagagtctttaaggcctattggccttcttcagcttcagctcagttcctgcctgactgttctttccacagggccttctctgtgtctggctcctggtctcctctcaccccttctggccccaaggatatttttagcaccccactgttactgaacctctggggtactacactctcccttgtggttgctcttatactcttcacacaacttcataaataatccctttagtgaactttgcacaagttaccctactatgagagagtcatctgtttcttgctagaactttcactgaggcagaagccaaactaactaatccagacctttcacctcctgacctttccaacttggcccccattattattatccatgattccgcggctgccaccatgcctcttcctcactgcatatcgaccacaccctactcactcggattctgaccctagcctttccctcttgcttggaagaatctgccttttccactccatctatccaaattctactctctttgaagctccaggtggaatcccacctcaccaggatgtcttaacagactatttgagtttgcagcaatctcttcctgctttgaactttgtactctgtttggtacttgtatttttattgaacagtctcttgctttctccagttttcctgtaggagtataaactcctcaaggtcaggaactgtttcatactttcccacctactatacagaactgagcaaaatcctcatatattttgttaatcaattatgtctatcaagccactcttttatagattttaaaaagatattgccaggagaaataatgtgactaaggaaaatcttagtactagagtattacctttgctcacaaaacacagacatattgattcttctcatttaaatataggataatactttactgattcttccattttcaaaaaatacaaagaaagcaacgcagggtccatccataagaaaaaaaaatcaacagaatgtaccaaaccttgacagacaaccattaaaaattataagaaacaattacccaagccagaaagaaaaggaaatagaagcatttcatctactcctgtgcctgccagcatttctggagagaaagaaaggaacatgaaacaaatattttacattagctatgtttaccaatttgttttcaaaaaagaaagaaaagaaattatcttttactttaaacctttccaagaagacaaaacaaaattttctcacctgactaacccgtaagtctgccartttcaaatgactttgaaataaaagccagtggaagaactgagtagctcagcttcccaaattacagatcctcggtgatggtatagattgccagtttagtggcagaatgacatcttttagtaaaggacaagaaaacgtcatcccacagagtcctgcacaaaatggactgttgacttgtaactaatgcaatagccaggattttactaactattcttcttggttacttttttttacagcaagacagggaaggagatgaaagtgatattaacaagaaggagatcttactataaacaaagatctgtaaagtaaaaaacaaactgtctaggctataagtgctataatatttgatataacgagagttgttaaatatggtctacataaaaaccatttattaagtacatagtataataccagaaaaaaataacaagaatagctaatttcaaattccactatagcagcaaaatttttatctggcctgtgtggaccactgtagtcatctgtgtttacaactaacatctgttctgattggccagagcctgtggcaggctgattaataatattttgtatattacacattaacaatatggcagaattgggtgtggcagaaatatgtacatgatactattggctatgactaattctagataactgtrctgtaaaacaacagaacacctagccattacccttggccttcccatcatcatgagccacagaaaattagatcaaatataatggtcaactgctactatattatactaacacagacacartgctttgggacctacttgcttatagtaacaaacctttcagtgagttttagaagatattactaccactgttgcaggacttttccttagttcagctaaaattggggtccttgtccgtcccacagccatgaaaatttaggcttgcagatggtttgaaggctgagtaaggcagggttttattgggtggaaaggaagaaaagggggaagcagggacactcacctaactagactgcttgccacccacagcttgaatcccaggttccrcaccaaacgaggatgggccaggctcctcctcrctgcaaatgtcatgaacttccagaggctctaccccagtggacaggctggatggagtttttccagggaccccctccccacttggctgtctcattccccactctaaagaagtacatctaacagttgttggattaagaataaagacaaagaccaatcttaactgcttcctgctgacaggggctgctgatttggggaaaagcagtcagagcttcctcagaggcctatttaaggattcccagcagaaggggccattgtccgaggctctggttgcatgackgtttggagtctgatggccctttttgccagcatgttgggcttctgggttcctttcccctgagcccaatcctaagacaaccagtttaaggcttgggaaattaactctttccagtttggaggatgcatctcaggggagcgtattacctatccgtgaagagagaacagaggaggagaaaggagaaaaaggcattttttaaaggattcccaggggttcaggatgcatttgaaaggggtacagactgaagatgaatggctacccatctagaaagaggggagcaagcatctctggtttccttctcttcctaacatatgcccaagatacatgagagagagaatgaaaagcatcctctttccctcctccatccttgcatccccgaatcccagtgaccttgtcaggtcccaccatgagtgccaaagcagcttacacccatcaagcagggagggccttagagaataagaatgatctgctctcccttatgtctctatccctgctactgtcagtagccttggaattccctagacctcatttataccatagatattaacatgccctttatccatgaaacaggaagcttggggttggcttaatcgacaggaatcagccatgctcacctgcactgtgccttttaacctccgttgtaatttgcctctggatacctcagatccagttttccttcctagggcttttacctaaagcttggaattgagtttgggacaaaaatatgtctcggggggttacatggactccttatcaaaagccaaatgctaaggtgaaactgtggaagtgagtcctccaacaagggagagaaaaggatgtcttgtgacacaccaagataactggtagctatagttatgcttgctagaatttaggtgcatggtgcttggctttggttagttcccttggtctttacttccccaaaaatgaaacctccaggtgatgggcaccctatttattccctatttattccatcacctggcaggatttgcaggataattgctcagaaccagaatattgatccagatttctacattacccatccctcttgttctttctgagctgcagccagagattgctggttggttcacaggaacaagcagggttagtctaaaatataggcaaaatcttaaaaacaactaatgagtttagaatttaatgacaaatgtatgataagttttgaaacataatttccctctctccagtcctcatttttgttaaaaacaaaatcataataggactgagttgtttgcaaatagactttggttttaaacttggcctaattatttgcataaagtgcagcaagaataattatttctacataagccttttggattggctttgatggaagtctgttccacgaggactctcaggtgagaccttttaatgctgatcccagctctgggtttgtatcctcaaatgcctgtgagttgggtgatcccctcctcttaaggtccaaagataaacttggagctcctggacctgttagaaagtgacattctttactgaccataggtcaagaaccctgtacagggactgcatagacaagggtattaggccagtttccccactgagttttattagttctgtaagttgagattgactccttaaagggaagcatacactttcagtcaaacccttgataaaatacccaatttttccaattgtgtcttgttgcaaaagaaaaatggattcttattgcactgatgcaaacaactatattgccgtaagttaagaatactcacagatagtttccaaattcgaaaggaaccaggcagagagaaacaagcatgctccaaattttcaccccaggagtataccttacttaactttttttttttcttgagacggagtctcgctctgtcacccaggctggagtgcagtggcacgatcttggctcactgcaagttctgcctcccaggttcaagcctcagcctcctgagtagctgggactacaggcacccaccaccatgcctggctgattttttctattttttagtagagacggggtttcatcatgttagccaggatgatctcaatctcctgaccttgtgatccacccgcctcggcctcccaaagtgctgggattacaggcgtgagccaccgtgtccggcccttacttgttaaaggctataaatagttcaaaataagtttccttgactctgaaaaataaaacaaggatcagcagtattccaagaaaaagtcaaaagttgcttcagctttctgagttctgtccatttaattaactcttgtttggtttgatattcgtgagcatttcagctcctcatgagtcctgtacattttcctttattccaatgttacaatctccaaagttaacagaatcatgtatttgcgagcacctgttaaagtcctgcagcttattataaactatcttttgaaaaggatgaaaacaagacagcaattgtctgtgaatagcaaaacgtccagtgtagttacagttaggaacacaattgacaaatttggttatctccatggtttacaataacttaacaacattaattatgattgatagcatacatttagatattagaatttttgaaatcccatagaattttggaacatagattagcattatttaccaagatatgaactaaagaagagtgaacatgattttgacaatcccaggtacctaaatatgttgaataatcctgcttacctcttttctggacattctaggggctctctggactatccaaaaagccaggtgtcaggaaggacaattttgaaactgaagtttgattttgagaagccttttaaatatgtctaaagcacttgatattatgaaacataattccagatagccataaattatttattgtgccaaaatgatgactccaaaatcttaaagaagcaaaaaccttttataaccctttacaaattttgccaaagagcagattagtgcctgaagaaaattttgttatggttttatctcaatgctcaatttacggaaaaaaccatataatacctttttttgaatagtcaatatgttcacacaaagaacctcttctgcaagagtaatttccacaattcttccagcacttctttgaaccttcagcttttttctatataatttaatacaatcctttaaccctaggccaaagtttacatttccatgccttcttataaccttttactataaaaacacattttactattcttacaccccttacatgtaaatctartttcagtagtttcaattacatggtataatgttaactcctaacaatttttaactttaaggtaaaacctggtaagttactttaattgtgtgctgactgcagccgaggtttgcctttttagttaagggtgtaattaatttcatatgtccccaggccttacctattgtgaagccaacaagacagrcagttctcaaaacccaaaaagcagtttataacctcaaaacacttagcaaaccttgcatctgacctgcatagtttagttcacctatttacattttaatgacaccttcattttaccaataatctttaaggctgtttttatttcttaaagagtaaagtcacatgcactgcaaggtactacagcttttaacttcccttaaaaaaattagatccaagtgcttgtctttctttaggccaaattaattacagctctttgacagacgttacacacagtacacacacagagaggcagaagaaaacctagtcactgaatggggctatttaagagacagatttagaaaaacatgcagrtattgaaccagaaagggctcattccataaggcaaagtcttgccactggagttacaagccatgccctcaggatgtataacaaaatggaggcttgatttaacaaccaaaactttgcagagaacacagtgatagttgttgggggtgggggtctggcctgctaaaggggaaaaagaactttaaaggttaactgcagacagggtggagaagagaaaagaaaaaaaaacatttaaaaatgcctggggaagaacctcttactcttatgcaagttcctccaccagggagaaaagtttaattactgtccgatggagctgaaccctttgkccagggaagcagaaggctgctgtggtgatgcatagctgggaacaagccagccagctgtgtgggacccttggaccatacgtcccagccccagcagggaggggagagcagcggggagctgctgctcactgctccttttttgaccctgagaatggaaggaaagggccatgaaaaggcccaggagcaatggggtatgggggcatggtttcccccaccctgagaagtccaaggatgaaaaggcttagaagcaacagcgagaggatttgagtccccatttcactcaccacttctcgagccccacgttgggcgccaaaaaatgttgcaggacttatccttagttcagctaaagacaagktccttgtctgtcccacagccatgacaatttaggcttgcagatggtttgaagggtgagtaaagcagggttttattgggtgaaaaggaagaaaaggggaaaatagggactcttgctagcgcagagtccctgctagagtgcttcccgcacagagtccctgctagagtgcttcccgcatgcagcttgaatcccaggttccacacaggaagaggaggggccaggctcctccccactgcaaactgcacaaacttcccaaggctccatccctgagggcaggccagttggagtttttggggggacctcctcccacctggctctctcaccactactcctttctaagtaaagcttgttagaatgggccaatattatacacaaatagctctaccaccatgaccttggatctgctcctagaatctcttccacatcatcattccatggcactgagaacctacccccaacttcctggctagttaccattacagacagtggctgtgcccagaatacagatttagtaaatttrtattacccagaaatctatctctttcccattactgtaaccacaagagttactttattagataagcttaatgactctggatatgcaggcttgagggtctgagattttagcaagaatatttcagtcacagatcatgtcatcaattatctctgatgtcaagaacacagtgtaagtggaatggaactayaacattagaccccaaagaccagctttgcctaccacagaaccccaggaccacaaaaaaaaggatgcttacggaaaacactggagtcaaacataaccattttggagagttttttgcatttttcctcaatgagaatatattcaaatattacttctgtagtttaaaaataggtcaatctagttttaaagtatgcttttcctataacttttaggtytactcagtataagaaatttaaatgtatgttctctactgtcatcaagttctctttcaccacctcttccttcttttctattgtactaatagaaaagatgaaatatctgcagagaagacattgggagagcctggtgaaaccattgtcatttcaacaggtaagcttagatctaatttctttgcttctcaactttcattcaaatcatcatgatagcatgttatttataaaacaattcctaattaaagataatgtttataatgtactttctcaaaactagcttatatttctaactttataacataatttaaatttattgcatacaacttggaaaatacagaaaagaataaaggtaaaaccaaaccattcaatatcttacagtttggaaacaaccatcatgaacatttactgcctattttctgccttctttcttctattatatacacatattactgagaccatatttacttagagtttgtatcattttttccacttaacctgatgtaaaggatattttatagttcactaaaatttcttcaaagttatcattttaatgacttgcaacattctgttgcatccatatggatgtcatcaacttaaccattgcatcattgtatctgacattacaaatagtgttttaattaagatatttaaacataaatctttgtcaaatcactaatttctcaaaatagattactaagtcaaacactatggattttaaggcttttaataaattttgccaaattttttttccagaaattttgttacaatttaaatatcccactggcagaaaagacaagaacctgtctcattgcagcacttatcaatattgaatattactatttattctagagtttgccaaaaggcagaggaaaatcatttctcctgtgtttattagatgtttgaaatttctctttcatgtatatttctattgcagtcttcccattttcacataaaagaatacttttaaatatacacaataaaactattctctgggcaatgtgttccccagttcatttgatttttggtaatgtgaataatgttttaagaaattaatttttcatgacttaaaatgtagaaattgagaaaatagatatttgtaaataaatgatattactttcccatttcttcctttactgacattcagagaaagccggctgtgcctatatttcaattttctcctaagttcagctaatttatcatttctggactgacttgtagctaataataggacaagcctagttgaattttaattataaaatgacagtaaaatgcatttttaacaataaaaagaagagctacatagttaattcccccatataaacagctcaaatttgacctgtgacacctaatatcaagtcttattcaaaaaggtattatttagaggaggarcatataaacatgtaaaaagacgttttgtactgacttcattttaatatgggaaaacaaaattaataagagaattgaaatttgtatttctactttaaacttgaaggtaatgtactttagctgatagaaacttttgtaataacaagattagatttagtaagttagagtaagttaatatgacccctttcttataaattatttttcatttttttaaataaaaactttgagggatcagtggacaattcatatattataatataatatgatatatcatcaccatatatttaagttctagcaacaaatgttttagaattatttccccagtacttctggacacctccagttgaagtatacacacagaacagttaagattagattttgattgggaaatgttactaggtgcctaggtgtgaaggaagagtgagaaatctccaaaagaggctgaatgtgctcgaagacaaacccaggctacctaataattgtttttaggtgtaagtatgtgaataatttatcttttcaaggcaataaaatggaaggatagccaaataaaaatttgttcttctagggtaccagctaagtacttttttattgtaacaaaaattgtagcataaaccgattattcatagaattacaaagtttgaaggtgccttacattggtaatagtctgatgaagtccagagcacagaacacctccatcccaattgctcacagcaggattcttcaatgagggcagaaggggaagatgccagggaccacatcctttgaggttctgatatgccacagggtatgtactttattagccaaaaaactgccttgcctagatgattctgatacccactctcacgcccccactaggaagcacaattccacacccagggcaattacttcacagagcctcacagtgacaagtaaccacttgtgaccgcagattcccaggtaccacatactcttcagggagtaaggaaagattgaatcatttttcagtatatcttgttttctaaaacacaagaataaactaaggcattctatgtttttgcctaattaaggttgaaatggaaagttgtttctggctaaatataaaccaattaactataacactattttctctgagcatttttttaaataataatttattacaaaatagaaatgcatttgtattataataacgcttttttctttgcttgaatagaacccagacttgcactctatgaagatctttaaaaatatcaaaacatttgccacatatttgaaatggtttatggtgatctgttctaaaagaagtgaaattcatagcatcttaaatgttctttcatctcttggattttctgattaaaatcttattcctcaatgattgcttaagcaatctacattttaaagacttgggcagtattctaagaaaaccctcagaagagcaaattcaaggtaaacatctgcctatgtgtcctttatatagtgtcattaagaaaaaattaatcaggtctcatctggcaaaagcatttaagtataacacatacagggaagcaccaaatttgggtccttaagagaaagaatgaagaatttaggacagagtatgagtcatattttttcaagaacatatttaygtgatcttaaaaagatgagttcagaaggcacctaatatctgtaaattccagaatgacagaaaaagcatattgaattttgacctcgttctaatttaaactcctccattctcatttttgtgtctttartttttaaaattttcacagatgttgccaacgtctcacttgggcctttccctctcactcctgatgacaccctcctcaatgaaattctcgataatacactcaacgacaccaagatgcctacaacagtaagaagttcctagagttgatctagctcttcatgtgcctgtttttgttctttagcaaaacaggaaaagagaatggataaaccaycctttaaataatattagtgctgtatttttgtgactctggttaagagtcagtgactttgttctattctttattctcacttcttcctaggtactgaggggggaagcatagattaagacctagaataaaaggggaggagttacaagaaacaatttaattataagctgtggagtgctggggctctttttccccagcacctaacaaaaccttatatatatatataacaaaaccatatatatatatatatatatatatatatatatatatatgctctccaagtgttagaatgaatgaatcaatcaatcaatcatgaagctctttcrccactgaagtataattccacattgacaacaagagtgaaggttttgttctcagttatgtccgggatgaataggtcaaatagatatcaaaatgatcaaaatcctgtgtgtaaaactagggaaaaataaacacagtgttctaaggcaaagaggagcactggccaccactctgagtgtgaaggtatgtgggatgagaggatggttacagaatttaattgtggaagaagggaaacactgtcctcattgtcgacaaattgtcgaactctgtaaaatatttgaagagatttattctgagccaaatatgagtgaccatggtccatgatacagccctcaggaagtactgagagcatgtgtccaaggttgtcagggtgaagcttggtttcatacgttttagggaggcatgagacatcaattaaatacatttcagaagtacattggtttggtacagaaaggcgagacaatttgaagtggggagggcttccaggctataggtaaatttaaacattttctggttgacaattggttcagtttgtctaaagacctgggatcaatagaaaggaaatgttcmggttaagataaaaggttgtgtagaccaaggttcttttgaagtttcatagtggctgcccttagagacaatagatgacaagtgttccctattcagacctttaaaatgtgctagactctcagttattctcttcaggatttggagggcctgaaagaaaaygatctagctatgttaatagagattctttacagatgcaaatttttacccacaaaggatgactttgcatggccatttcaaaatatggcaaagagacatgttttggagtaaaaacaagttgattttcttctttgtcacataatgttatgccagagtcagattggaaagtaagtcacactatatatatagggttaaataaaacccatctgatgagaatttatggtttgtagggcatgactccccaaaccccttagataggaatttgggcaagataagaaaaactcagagcttagtcctcactcattagccatgtgtgtagagctttggctgcacaaagtaggcagtaggccccaaaggaggcagtagtataaggagtggcagactagaacctggcatctcacactgccactaccaccagacctaccacccctggggcctragaggtgactcctctaaccctttccccttcattacaacctctctccaaggcacaggtcaaagcttcagggcaaaggcacaaagttcagcctcaccagctctacaagataaatcagagattagaccttgctggccatcctatctgcccattaggccacatggttccagttttggttgaactgctggcatgaataaagaatgaaaatattgtatttcggccaggcatggtggctcatgcctgtaatcccagcaccttgggagaccaacataggaggatcacttgagcccaggagctcaagatcagcctaggcragactgggagaccccatcttcacaaaaaatttaaaaattacctgggcatggtggtccatgcctgtagtcccagctacttgagaggctgaggagggaggattgcttgagcccgggaggttgaggctgcagtgagttgtgatcgccattgcactccagcctgggtgacagagtgagactctgtgtcaaaaaaataaataaataaaagaaataaataaaatattgtatttttctgaaaaatgttcttccctcaacagtgaaaagtactgttggaaaaaattgttgaccataattcagtatatattcactataaaatttctaagacaactcatctctcatctcttttctcacaacccctctgtcccatcttcttcaaaagctaatataagttcytctctctggttaaatatccccagaatatttcatttcacagtcatttaaatgttccatgaaacttccaatttgcctaacaaaatggaatacttctaaagaatactgcatgtcagacttttcagtgtcccattgatcctagcaccatgctacacccatacagatgctcaatgtgtgtttttttgaatgaatgaaagtcttttaaacaaacatcagaagtcttttaaatgtgaatccacatcctccttgtgtcctactaaagttagagagaggctgtagtattgtccatgcccatggtggaggggagtttgtgacaagaaatgaggaggaaatacatatgctaccatttatccagttgagctctgtccctcagggcaatttccattaactgttctcttctttcagcttctgtaactctgatttcactataagagaccatgtacgtaaccagagatattcaattttccgcagagataattttacttttttaagaaaactaatgggccttagtatcttctgggtatccaaggttgaaaactctgtcaaacccaagtttgaaactgagctctgggcttgctctgtgtcctggaagcccatatgaattcagagcaatgagaaacccctgctggyttccagaccaacaggcaagaaggatgacctcttggcccttagtgatggagaccaagtccagatcctcagaaccatgcctccgttcttagccacctgcttccaaaggtggcccaaatacatcattccttctgagagaaatttcaaactttctcttggcttgatagtattttctaactagtttcaatgtgaaatttaagcacaaattttctcattaaaccagtctaggctcttctctaagttctagttaaaaggattttgattgcaaaacacttaagccttcataatccacttcttgagacagtatcaacatatattatctaaaataaccatttatttgtggtttaggttaacagaagtccttttttttttttttaaactcaggaaagagaaacagaattcgctgtgttggaggagcagagggtggagctcagcgtctctctggtaaaccagaagttcaaggcagagctcgctgactcccagtccccatattaccaggagctagcaggaaagtcccaacttcaggtgagtagacccggcccatacaaccacacctcaagctgtgactgagaggtgggagccgataggacataaacccttacggcgaacagttccagcttctcctggcattcatgtttaaccatttaaaagaaaaccaaaattacaatgggccctaacatgttagaacaaatggatctccaggaaagtttttcattccagcctttctattctcaaaacttgcagtggtccccacctgccccctctatccacagtttcggttaccctgtcaaccatagtccaaaaatattaaattgaaaattccagaaataaacaattcattaagaaggtcaatagtagcctaacatatgtcacaacttctataccatttaccttacttcgtctcatcacatagrcattatattgagagagagagaccacattcacataacttttcttgtagtgtattgttacaattgttctatttcattattagttattgttgtaaatcctttgctgtgcctaatttataaattaaactttatcataggtatgtgtgtatggaaaaaaaatgtagtatatatgggattaggtactctccacaatttcaggcatccatagggtcttggaatataccctccaccaaggataaaaagggaccactgtgtttacatttatctttcttcaaaaattagtaggttttgccaaccgcggtggctcatgcytgtaatcctagcactttgggaggctgaggcgggtggatcaggaattcgataccagcctggccaacatggcaaaatyccrtctctactaaaaatacaaaaattagctgggtgtggtggtgggcgcctgtaatcccagctactcgggaggctgaggcaggagaaccgcttgaacccggggggcagaggtggcagtgagccaagatcgtgccacttcactccagcctgggtgaaagagtgaaactctgtctcaaaagataagtaaacaaatgtaaaataaataaataaataaaaattagtaggttttaaaatctcattgaactgaaagacattatgcagctgctctatgcctagatgaccattatggtgatggtttcactggtatatacttatagacaaattcatcaagatgtatatattaaatatgtacagcttttgatatgtcaattatacctcaataaagtagatttaaataaaacaaaatgactatgtaggcaccaagtagagaagatgctgggttaaagtataaattattaattcataatactttgtctttatataatatttctatttttacagtttgatgcaatttaaagacacaatatttttcatgggtgataagaggaaggcaattatattgtccatgtcatcaattaataaactgaggagctttcccaagatgtctcttccatctctgacctttgttatatctgtctgtctctaattaaattcaaatctcttcaattccctgcaggataaatccagctactatgctgagtgtggcatctatataccataataagatctctgcctttttttttttttttgagcctcaccatataccagttccttatcatccccctccttttcactctagtttccaggaatgcaaactatttccaatttgtccccccatttagcctttacatgtgctgtctgctctgtctagaatgcccttctccaagtcttgttttacatacttcaacatggaaagttccctctatccattctgcatccagtgtctctcctgggctcactcattgctttcacaacaccctttcttgagactgcttgcttatgtgtctatggcctttgctatctctactccttcctcttcattcaccccactcatcaccaccaggctatgagcttctcctagagaacaggagctgttcttttaatctctgatgcctaaccttctaatacagagtttgggatgcagttaactactcagtaattgtttgtataaatgcaactgaaaatagaagcatccatgagattacgtaaccaagaactacaatgtggacaacaggagtgcacacgaatcttactcagcatggccagggaacaaacaggcccccttctcatacttggagaattcaatacgtacctcttctcaccctgagaggagatgaataagtgaaacattcttaacctccagcctctctctgcatcagcattcagccaataaaatgtaaagaattatttctataaatgtcaaagtaaaagaatcagcatggggcatttatgaaccagaaaactactcagacatggattattagaccaaatgaattaaagaatagtttgttaacatttccatttgttctttggaacattctttttggcaattccttagtatagtcagagtatcttcaaagtaggataattggccatagactttttgatgatctattgtcaattttctaaacacttacaacaatctgatgtagaataatgcaaatatattgggatttttaaaaaatcagagttctagtcctgtttttgccaaaaattagctctgagaaattggagatccctggcctaacttccttgcttagaaattgtagaagatgacctcagagttcctttccaagtctaaactgctgtgtatagacataatagctaacacttttcttaatgctttatatgtactaactcatttaatttttcatgcaattctgtaagtgagtaatattatttcctctttttgtaagaggtaactgaggaaaggagattaatatgtccaacggtgccacttttattgtctggcaaagccaagattccaacccaggcagcctggcaccagaactcttgctcttaaccaccatgtcatgcctcctatttttcccagataaatgtttgtgggaagggactattgtatcatcatcaaatgggcatgtcttttgtctttttctttctttttttttttttttttttttttgagacagagtttaactcttgttgcccaggctggagtgcaatggtgccatctcagctcactgcaacctccgcctcctaggttcaagcgattctcctgcctcagcctcccaagtagttgaaattacaggcaggcaccaccaaggctggctaattttgtatttttagtagagacaggagttcaccgtgttgatcaagctggtctcgaactcctgacctcaggtgatccaccctcctcggactcccaaagtgctgggattacaggcgtgagctaccgcacccagccaaatgggcatgtcttgctagcctctgaaaaacttataagccaaagaagagtacatcctgcccaatcttgttccagagacccctggcgtcagtgctgctggttccatttgcacagtcgtcactgatttctctaagattgaacccctctgcttacaacatctgttccctccccaggctccctagcagggccccaaccacctcacagcctgccatcagataactaatcagccccaccacagcccaatgcctgcattagcacattcaggcctaatcaggaattaatggacagtgcttcgcagtaatttaatttccacaataaacctaatgagcaatttaatacaaatgtcaaaaggaatcatttagttgttgtctgaatgctttctcctgtgcaaaccttcatgaaaactcaacacagctgcctttttatagcccagttaacatacattccagcagaatcagggaggcccctgtgcatttagtattattaataaggttaactgggcacttaattagcaatttagtggttagtgctccatgactagaaggtccccagaagattatttagcagaattaactgaggcttttgtcatatcctccctagatgccttcctcacactcctaaacaaagctgactcttaatcaatcccagataggttcacaaagagggcatggacataaacaataaatcccttccacccaagccaatgccatggagccctcctggagaggaggagggctctcccccgcagtgctccctgttgctgatgctgcagctgcaggcatctacaatgccagtcccagggtcgattgactgttttcatgtatataacagcatctctggtatcctggagaagaaaaatggatgattcaggatctgaatctgctgctccagaaactgcagctcatgtttaaatgttaaatccctggagctgttactgaaatagcatggcaaattccctgtggccccaaagctgtttgtcctaggaagccacagcagatgtgaagcatgtacacagaccttcctgcctgccctcagaataaagactagctttgcagaacccaacctcctagatttctgttgagcccatggcagggtgtgggtggagacacagaaactcgctccccaggccttctgcccctgacctctacagggaccctcatcctgtccttcctccctctgagtttcaaaaatgactaactaaagacttgctctgctctttccaggctccatgccgtgtgctcacttgggggagtaagagaaaaatgggctctcaggagctggcaatccagcaggagaagtagagaataagaaagtaaataatacaaatcactaactgcccagctgtgtaccaggcacttgttacttattagttgtcattgttattcctttttgggtaaggagaccaagattcagagagattaagcaataaactcaggatcttgcagctagaaagtagcagaaccaatatttaaaccccatcccgtacaaagagctcyggatcacccaaaagctgagctaccttcatcactgtgattcctmttatgttcagggaatgaaactgcttttaatattgtcacaaaaaatatgtatataattagaaggtaaatcagtctgctgggggaaaaaatttgtaatgcagtctaaagcccagtgtaagtgatttggggattatctgtgtatcactgctctagtccttcacacgaacaatgtaaagttggcagtaatttttgatgtggtgacaacacagtggaatggtagtgaatttagagaatgaagagatgcactcaactgaattaaacaaaatgtgctgggtccctactatgtgtatgacaatctgctagatggaatgagggaggtaaagaaaaatgaataaacaggacatggccaaggagcatgatctcggtgagggaaactgacatgtacctcacagacttttatggggtatactgcaataaactctagagtagtagagagaagaaataattgaacctgactttggggctctacaaatgcttttcagtacagaagatgtctgagctggctttgaaaatgggtgcagtgtggggaggagggaaagttaataagcagaaggtggaaaaattgaagagaaaataattcataggaacttgaagacatagaagtgtatattgtatgtgggaaggaacaggggtcagtttagtrtcagtaaaggacaagatattggccaaggggataatgatggcagraagtgaatggtaaggtacctgggggtggggtgcagattctggagggtcttaaatgccattctaaacagttggatcttgttcaatgggtccagcaatgaactgttagtacagattcttagtaaaaagattaacttcagaataaatgtagtcaaggagataccttctccttcctcctctcccaacacacccagaaaaccatttcttctctgcccactcacacacataaacccatttcagcagtgcaggagtagggatagggagggtatgccagacctgtgaatgagaacatggtgaaaacaaaagaccttgtggaattcaaaccaaccagagtcggtggctgcatgtggggggtgggagggaaggtatctagggatgctgcgctttctagaatggaagacagtcggggttcatgaccctgtctgaggcagagaggctgaggacaaaggcagacttgggaagaagagaatggctctggtttgggcagattcatttagtggcaaatgttgggatatttatgtggagaactcaaggctgcgtatcactgatcaattaagccatgggagaaaatgatatcccccggggacaaggataggagagaggggacagggaagagaggaaagggatgggtgtctgctcacctgttcagtttcacctttcaccctgctctctctcccaagcttcactactcaaccactatcccttcctcagtctctcttgcctcccagtctccaacaggaaagctggatggggcagtacttgtccatgtgacggtgtccccagagcctagcacagcatctacagtcgagcttccagaagaaaagagagagtgactgagtgaagcaggaggctgaagatggaaactcgaaggctccttatgtttaagtagaaagtaaatacagaaatagggtggagcaatgaagatggagagagtggtcagagaggtggaagaagaaccaggaaagagcagggacactgtagagggggaacagaaattgccactggatttagagagagctggagagacagtggcctggagagaatggccaggctgtagtagcttaaggattagttagtacagcaattataaaatattataacaggcctcattagtaaggtcaaattaattaagaaaatttattgtgaagtccatatgaatctaagagtaaatctaatctattagattagaatctatttctaccactttaagtacagcagccattttgaatgtaatcatccctttcacattatagataatttccaaaccatatcattaattcagaaaatatcatagctaaaatattatagctaactctagttataattatagtcagaaaatattaccctatgtgtataagtaaaactcctgtagacaaaaaagttttcatgtcctttgtagggacatggatgaaattggaaaccatcattctcagtaaactatcgcaagaacaaaaaaccaaacaccgcatattctcactcataggtgggaattgaacaatgagatcacatggacacaggaaggggaatatcacactctggggactgtggtggggaggggggaggggggagggatagcattgggagatatacctaatgctagatgacgagttagtgggtgcagcgcaccagcatggcacatgtatacatatgtaactaacctgcacaatgtgcacatgtaccctaaaacttaaagtgtaattaaaaaaataaataaataaaataaaataaaataaaaaagtttccttcaaataccaccttaaagctattttatattttatttaaagtaaccgtaagagcagatcagaactatccagttacagcttttaaataaatagcaaaacactttcctctgggttttggaaatcactaggaacaaagagtttggcctccttagttgtttcaatttttctttttcatctgatcaatttggagagtttttttaaaagaaaaaataatcattttccattttcagctgttcccctaactcatcaaaagtgttcaggtttttcagttaggcaagaacwgacccagcagaaccaaagagtattttacaaatttctttctctctgcagatgcaaaagatatttaagaaacttccaggattcaaaaaaatccatgtgttaggatttaggtaagtaagagaatcaaactcttctcaatttttaaattactttcttcctatccttttgtaaaaacaatgccataaggattataaggtcctttttccccagttgtttagctctgccaaatcctggaaayggastacgtttcagataaaggaactgtctaattagaacatgactctaggtgattcttaaggggtaacacaggagctgtattccttccttcttctgggaatcagaaatagtgctctctatagagagctcatctgctgtctttggtcatgtggttatgaatgagcttcttaggaaaatacctcagtagagacagatgaaaaaagrtagacattaattgcctacctttttaaccaggtgtctgattgcctggtttcctatgggatgctaaataacatcactatttaaacaaaccatgcttcccaagagagacaagtgaacaataaaaagtcatagctatccaggtaggagagttgggaaaatggggtggaaaggaataggagcataagcaagacattctaaaatataccttttatgtcattttgacatctgattcatagtaatctattaccactcaaaaattactaaattaaaattttaaataaaaaaataagatcataagatagtgccacactaaagagggtttaaccatattcccacatctttggcacaaggagggctgtatccttcagcatcccaacactctcatgtgggttcatgattgggggaaataatttttaaatctttttttgtaagttctcatttttcaaaacgtctacagatgaactcataatatgctatttttaaaatgtgccacagggtaaatatcagccctggtatgaacagaatgagatttcttgccccaaacgagctttgtaaaccagggagcgtgggctcccccagaagtgtttctggctccttcactgcctactgtctgaaagcaagaagatgtacagagcaagggctccacaggcccagaaaaagaaatagctttgcagggagctctcatggtttatttctttcaaagctatcaggcccctctgatttgtataactccagagaaaggaaatactgaaaagtgaaagttataaaagatgaaacccttaawatctaccaaagcagactcatttttctttatttcaagatgctgctcggtagtattttctgtgaaatcagatggattagagaaaaataaaagttgatagaaaaatattctgcataaatgcaaaggttttctgaataaaccactgcagtggaagaacaaatttttaatttaaagctgaaggaaatgatgggaacagttgttttggtgaatattaaaatgttcattatccacctcccttcaataaatgaaaaacaaaggtttaaaaaatctgttttagaagtaaaccaaaatgttagatgatgaaattttacaaggtaaatattttaaagatatatctcttgacactgaatttttaccaagtgcttatctttgtaaggatttattattatttctgccaaagatgcctacaaagtaagtttgatcacattttcccagtgatttccatgatgacatgaagatttagtccaccataaaatattttggcccttgaatacaataaataatgtgctcatgacagtggcaaaattgtaaccattaataatgatgctcagaatattataaagtaaacatgttattaaggaaattgcttttttgtgggccagatccctgaagaagaccaaaaaccctgtgagtctcctggtactgactgtcctccagctcatttgtataaaggttgatttacaatttaacaagtacttttttatcagtgacttcattgaattcaacgtgactgggaagtagttaggacatgtatcattaacacaattatgaagatgaacaatgaaagggccactttaaatattgctttatctctcagcaaaggtggaaaactattaacaatcatgcagtcttgttggagggtatactccttcaaatacttgtgcacaaatgttcaaagcctctttattcttaatagccaagacctggaaataacccaagtgtctatcaacagggcaacaaattgtcatatattcttgccataaacaacttctcaacaaagaaatgaactattggaatacacaacaacatgggtgcatctcaaaataacttcgttgagtgaaagaagccaaacaaaagtacatcatgattttatttataatagactctagaaaatgcaaactgatttatagtaacaggaaacagatcagcagttgcttaggaaggtgaggcacatagggatagaaggggaaggatcgcacagtaggatgagtaaagctttgcgattgatgaatatgctcactatcttgattgtggtaatgrtttgacaggtgtatggcatcaaaattcttggatcgtataccataaatatgtcccatttgtttatcacaatgatacctcaacaaaacaattatttaaaaattaaaaggactagggtcttgacccaggaagcctggcctctttacagaacctcatggattacaaactattgctgaaaacaagcaagagggaggatgagtgtctggttggtagagaaggaagtctcacccatacagcagcactagttagattcttccttgcctccgcagaaggagggttgtggcatgcctgtagcatgtacatttcagtcatatgatatctggggatgaaagttacattagttaatatagtccaggcagaaagggcaacaaccccaatcccatcacatgtgtagagtgtctttggcagcaactaccatttgaaatgtaaaaggagaaagctggacatagctactaaactgaattcatacatgtgtccaaaggagtgcaaaatgtgttcatcagtttggtractaaatggtcttttttcatgcacaagcaggtggtagcatggaaaaatgagccaggcttgaggtcaggaaggccaggatttcaaccctgcaattcccatttgacacttccttctatgtgcctgttcccttttctgtgaagctgggattacattgctgaaaagattaaatgagaatgcatgtaaattgtttagtacagaccactcacccagtaaacaggtggtggtttttcttgcaagctgtccyatggtgaattggatcaatccctcaaagcttactgatagcaacaattcaaaacataatctgtcaagaaaacaccagttccacggttttgcctcagataaattatcttcaggaataaactaatcatttaatgccagtaagagctgagaaatccatttacaaaatacttttttaaaatgttctggcaccagtaccccccaaaatgtaaaacatgtaggatagatttccagcctttttagatggaatatgaagaaattaaggaatgtaagaagaagaccaaaagtgcagataatctttgaactaaggctcaaatcctaatcagaaacatataatgatgtttacttcttagattcatatctctctcaaagtttccattcaaattctgatggcagtttatatgaatctttcaaagctctgaacaaacaaaagagacaatggaaagaaatatttttttcttttgtatataaaataattcattgaatgtctcaataaatgtcattaaatttttttctctttttcatgtttccattgtgcatgatgaaatgaagaccaaagaaagaaaaagatgggtaatttggactttaagttttgaaatatagtacattcccrtctcccccaaatttatatactgattttgcacaaataatttttacatataatgtcttggataagcccattactttttgatggtttcttatttaaatggaagtaattgaacaattgtccagtagttaaaaaaaaaaaaattctcttatcaaagtcactatgtgggatacaggtaaatatttccttggtcagctgaacaggattttatcatactcaaggtatagttagaaaaacataaaaacactatctgtgctgcaarcataatttatttcttaaatgccatttgtaatgggcagttgtctatctgaaagcacacacatacatggaatcaacctaagtctggaataaagcagagaaactaatttgctcctttccaaggtcaatgtgaactgagaaaagggcccactataccttggaragctcagtaataagaatcaactttggctctgtaattgactagtgaaataacaaacgatagactctaaatgattgtgtcatctgaaaaaccaccaagaatacacgtgatcagtttctgtggcctttaaaacacttctacatcactctgtctagatttatgacatgaactaaaggtaaaacctaattcctgaggacagagacatagagaatcctgtttcatttttgcatgcaaaaaagctttgagttaatgaataggataataaatacagttacctatgtcctgcttatttttctcttttctcacaccttccttctaagatgttattttaaaagcagcttgagrgaaaagagtattatgtatcatttaaagttgtatttttttaattaaaaaatacttattttaaaaaagtagaaaagaaatagccttaagaactgaacctttgacttggttacaacacatatgtatatatatatatacacatacacacacacacacgtatatatacccatatgtatataggtgtatatatatgtgtgtatatatacacacatacccatatatgggtatatggatgggtaatttggactttttttacatatatatactatatatatatattttacatatatgtgtatatgcataatagtatatatatattgtgtgcatatatataatatacatatatatatatactattgtcctactgctatatcttacattgctatttcatagaccttcctaaaggaggctatttgtagaagaaaggataattcatccttcttcctgattggcayggcatgacttataagatcacaaaaaatagtggtcaataccagcaacttttttgacaaaaagcactttttcaaaaagacctaggtgggcacagtggctcaggcctgtaacctcagcactttgggaggccacagcaggcagatcgcttgagccatgagtttgaaaccagtctgggcaacacagcaagactctgtctctacaaaaaaatttaaaattagcccacttccttcctgtgttcccagctatgctgggggataaggcagaaggatcacctgggccccaggacttcaaggctacagtgagccatgaccatgccaatgcactccagcctgggtaacagagtgagaccctgtcgcaaaaaaaaaataaaagaaagaaagaaaaaaaaaaacctaaagtaaaaatctatggtcacttgattcagttagtaatccttctttgaggtggactgacctccctcctgccattctattttagaactaaaagatatatttattcttttttcatattttaagtttctgataaatgttgaaatgttttaaagtgggatattctctccgagcccatcaggaaagaggtggaagctatcctgaagctttgtagcaatctagtgattctctttgcaaggyatgtaacaatggctttgggtggggaatgtgtcctctgctatctacagctcaagctccacagagatgcaacttacggccatctttaagagacacagtgcagaagcaaaaagccctgcaagtgacctcctgtcttttgattccaacaaaattgaaagtgaggaagtctatcatggaaccatggaggaggacaagcaaccagaaatctatctcacagctacagacctcaaaaggctgatcagcaaagcactagaggaagaacaatctttggatgtggggacaattcagttcactgatggtcagttaatgattgcttagttctgagtttattctcattttggcagagactaagaatgtgaatgtctcatggaaactgtcattttaacttgggtcttctaaagtcgatcattactgtgacaggaatacatatggtatcatttctagcttttctcactccttcctgtgtctcatttgatgagtctttggtacccacttcttaccaaggrtagttctaggagaatccaaaggtttcagttcagtccaagtcaactgcggagaacgaaggcagrgaaaagaacccacagacagttctgttaccctggcacaatcaaaacatattctctcatgtagtcaattggtcaggtctcagcgagaaacagatggcacattcaaattagtataatttgaggagagtttaataaagggaccatttgtaaaggtttgtctgtacacaaaggattaggagagttccctgaggctagaagcagcaagcctcattactatctccagacttgaagtgttgcctaatgttgtatgccatgccaaagacagagcccaaggaaccattgatatagtccatattattcaaccttctggggcagaaagtagcagggaggggaggggagagtggatctagagaagtcaacaagatcatcagkcacacttaggatcctcagagggcagtcctcagtaggttcagtaaatggcaaagtagatggacactggaaatgccattttagtacaacatggcatgaaactgtcattttctgccagttctgttttctgcctaagataggcactcttaacactagaaaacttcataaaggtctcttgagacaagacgaagggccagggaaattcataggcaagaaaaggtcaacttcacaagtgtctcagagacaacctgatactcggggcttgtcccttttgagccctctgtgtcattctgagaatcaggctttaggttgaaagtttgccacaaatgatccttggttccagtatttattctagtcattttgtttcttatcagtttagtcatatttttatccctaatggtttagataattagccagcctgcttggtccaaatctatagaataaaactgagcaccctaaaaatccaccctaataactattcttatcacataaacatgcaagatgcacccttygcaactgtccttcaatatatcattcagattaatgaccttttttctatgcctctggtttcctaatgatttgttgtactactccttaaggattggttattcyrcatatttcaacctggactgttttattgtcccaaccacaaaagaaaaaggaaagatacattcaaatcttgtgattttttacccatagaaattgctggatcactgccagcctttggtcctgacacccaatcagagctgcccacatcttttgctgttataacagaggtaagtttgttgtccttttgttctttaactaggaacaaagtctcaaaaccttccaccaaagaacaaatcagcttaagaaatgaacagagcaaaatcccctttgcaatgctaattaaattcttttctgttttttacaagcagcacttgcttaacccactttcagtatccgtattaataaaatataatacaacttgcattttaaatatctcaaagttcaaagtttccttcaatttagttagatttttgtttcatttagaatcaggatgggctctgtttttaataaaacaaacaaattttcatgaactgaaaagaataattaaagcagaacatattatttgactttcagaaatatatataaacatgatcatactttataawtttgtttttatgacttaaagatttacctatgtatttatttatgggggtttgataaatacaaattaatgtctttaaaagtaaataataaattcagtaataatttttgtatttaatttaaacctatgtttatttaatttatgccagaagttgtcactggggtgttcataaatagaagtgctgactaagctttattccctcctaaaatgaaataattcataacatgattgacataaatcaaagtatcttagctgttagttaagtctattcaggcagattcagttatccgagaagcaatagatcttattttaccactgtatcaatggatgttatccttttagaacatatttctatatcagaaccttcctccatagtagattcaagtcaacaacaaaatagtttgcctaaatttaaatgaaaattttgaaatatgggtatagcccttctcatatacatacaaacatcctttytcaacatctgtcttgcaaaattcattcttcaggatgctactttgagtccagaacttcctcctgttgaaccccagcttgagacagtggacggagcagagcatggtctacctggtaagtttcccctcacaaagtctatgttagatgacaacatatgctttgaggaatcccattatgatactgcctcaaagaccagtgacaaagccatcccgaacccaggaaaaggttcactgccaccagcatttccaacagaaaagcagtccattgaactaacctttctgcagaggaggacatccacagcatccttccttcagctctagttcccagtcctacagccagcaccggcagcccttttctaatggaactggtcaaggaggctgaaagcaaaacagcaccaactgctgctcacccagaacaacaatctcctctgggcttggaaactgagagtccatgaggacaaggtaggtcctaaggcccaagtccatgacaagcagccatgtcaaccgtggactgggcctttacaatcactatatgtattcctgtgccttttacatgctgactatggatacaggctgttctgctacatgtgtttctttagtgtaaattagcacatgtgtaagtaaaaaagaatatcagtaaacactgaagtcttagtgattcacttttgaatctccaagaaggttaattttgaggcaatagtatcaaactttttcacagttaaagagaaatatttagcaacatatgaagacattagggaagaaaacaactaaaaatcttgcagagagccttttttagtgcaaaaaatagctgatttagtggctccaagaacccctattctttccactctatagagccctgtggtaaaactacaagtaaaaaacacaagccccaggatactaggctgataagaatgtactgtgattataagtacmaatgccattggagatttgcaatgactggtatatttaataagattaytattgttttagttagaggtctctacattctacaagttttgagtggactatcttaactgtattttcctcataaacactgtgcaattagtatgccattttacagaatgcaaggtatttcaggaatacatatatggtatgatagcagaattaattatacaaattggatttcatttacatgattatcagtgaataaatgttaacttcttgacatggttatttattgctgcattacaaccatccctraagttagtggcctaaaacaataatcatttattttgccaataaatctgtaattttggcagggatcagcagggacagcttttctctgctccatgttgtgtcagctggaatatctcaactggtgttgaagatccatttccaaaacggttcactcactggctggcaaatcagtgctcacccaaagctgttggctgggggcctcatttcttctctacacaggtctctccacagggttgcttgggtttcaccacagcatggtagctgagttcagagtgtcagtattctaatatcttaagggcctaaaaacagcatcatttcctcacattccaattgctaggcagctgcagagcccatctagattcaaagggaggggacatagagcttctctcttgatgggagaagtatggaagaatttatgccatttataattaaccacaatccatatcaaccactattttgacatccaaattattttaagagttgtttggacaaaacaaaacaaaacttttcatgaaatgattgatcttaagcactcactgaatacttttctttcattctatcataaaactttcttataagattagcatttcaggtagattaataaaaataatagtatatctatgatgaaagcattatcttatttccaaattgccttactgtttccattttatttatacattccttttactcatgaatataccatagaacactaaagctggaagaaatcttagagataatttggttaagcttctgtgtttcacaaatgagaaagccaaggctagaaatgtgaagtgccgtgttcaaggtcatatcatagcttgcggcacagccaggatcgttattcaagttttctacatctattatactatgtttggcttaagtagctccatcctttgcaaaaagcataacctcaaacttgctttgccctcaaaccacagcctcttctctctctatttcactactctgtcaatttttctaaattgtctaggcttctgagtctctattatgtcacctcctaatcaccacagggtttcacctctaacccataaagcagggatgtaactttcacaaaagtcacagatgacttcctaattgatcaatttagcagtctcatttccatcctcttttcatttgacatttctggcacgtgactcttgttaaccaccccgctcttgaaactcctacatctgggcttccacaaagtgactccttcttggttcttctcatataccctacctactactcctccatatcctgcagtgtggcttatcattaaatttttttaattttgcttattaaaatcctacatcattttaaaaaagatttatagcgatttacagacatggatccatacaaaaagattttgttttaaagaatggaaagaaaaatggaagagaaaataaaacaaagattactcctttagtgaaatggaagtgtttgggaactagattgaggtggtgatcacacaacattgtgaatgtgccaaatgccactgaatcatttaccttaaaatagttaattttatgtgttataagtttcacatcaataaatttattaaaataagataactctgtaggaaaaatcatatacaaaataaacatcatagagttcagtaggtttgctttagatgcttcatgatttgactctgagcttcttaacaggctgtgtaaagaggaaaatacaattagtcacctaatatagatctgcatgcttacagcatggtaattgcttaggagaaaaatttatctgctgaattctcataaggaggacagtctcggttatagtaccatgtcctgtccacatgaaccttcctgctgtgtaaaaccagtgtcaagtgtttcctttaaggccctccctggacatgtgcaatgaatgccaaagccaagttcattacagaagttccaggaggggctaggtgctgacagtctgccttaattcaagaattgattttgcattatttagaggaatagctgtgctgtctaaccttcagtcaatgctctataagtaraaattatatctcatatttgagcttgtgatttgtattgagcaagaagagttatatttgctgacctggacctagagtgcaaatattccacattgacaagagcagatccatatgctttcataatcagcccaaatgggagtagaaatgacatatcttaatgaaaaatggaaaccctaactgggaaacattcgtgataaaaagacagttatacatggaaaacggaaaacagaaaacaaacaaacaaaaaaaaagtgcaggggcactctggacaagagcaagccttccctccctcataaaacagttctggccttttcccatgtacaggtaaaatgaaaattagggctccaaaatcctgcaccacagtattactgagataattttagcctggaaaatttttaaggttagtgtcaccaaacacccaccaggccattaaaatctctgtaaagcactcaaagaaatctttcagcttcagcagtttaacttagtagttaattctgagataaagttcttgcaaaatatgcatctaggacactaaaagaattggtatgttgtatagaattgtggggtcttctattgttactgtttttttgtagtagctgatcccaagccattcttttttgtagagccagttatctgttaagatcactcctatcggccgggcgcagtggctcatgcctgtaatcccagcactttgggaggccgaggcaggcagatcccttgaggtcaggagttcgagaccagcctggccaacatggtgaaaccctgtctctactaaaaatacaaaaataagtcaggagtagtactgcatgcctgtaatctcagctattcaggaggctgaggcaagagaattgcttgaacctgggaggcagaggttgcagtgagccaagatcgctccactacactccagtctgggtgacagagcaagactccatctcaaaaagatcactcctatttcataaaaatgagtcatccacatataggagaaacttgatattctgtcctccacacaacatgtatccaacttgttcaaaaatagtattaattcacagggtaaaaattttttgtggtttggtttggtttagacgtgtaggcggcaatacatttctcttttagttgattagaatgatcatctggtctatcaggagagaagttctttagtgtcctccctcccaaattgcagactttttcacttgcaacatattccatttaagacagaaaccaggtctcttaataaattgcagtattttaagtgaagaagcaaactttaagcagagctactgtactattggacattgctttgtcttttattgcccatctaggtaatatgttaaaattagcacatttccaacttttctttgtctcatctcagcctttgactccatcagaaggaatccgtgacatgagctaaactgaatgatctcaatgtaaaaccaagctgctaatgttccatgtggtcagggacagccgtctgtctctattcattcctatattggcagtgtccagccagatgctatattaaaaattaatacatgttaaaggaattacagcagtgaatgaatgaatttgtattacaatatctccatgaaagtcagactttattggaataatctagttccctttttaatctgtctagtaaaaagcttagagccaaatcaatgttctagaagcagtatttggccatcagttctggtcacaccactcaccattgccaaaatttgtcattcattgtcacgttcttgtgcctttacacagttattttttcttgtgcctgtaatagtcttccattcttgcagcttgatgacctccaactcatattttagtttcagctaacatgctactttctctgtgaagttttccccaacggctccctgaaaaggatttataattaccatctgttccctgattccacagcaaaaagtcatctagactgccatcaaacatttcaattcaatacagaattgaaagtattgctatgcatgtctggaatccctccaagactgaattcctgaagtaaaaagatatgttcttattcctttttttaaaattcctgtgctaagcacagtggctggcatataattgcagtttcataactatttgtcactgctgtcgaccttgttgggcctatcagtactatcatctcagacagtaaatgcctggaggatatgtgccctccctgtgctggtacccacgcagctcctcagacagcctcacgtgtaaggcaatgtcccttattggtaaatactttcatcaaaataagagtgctgaagaaatttaatcagctccacctcatgtgatgtacccactaccacattgattaaacgtaggtatgcagggaaagaaatttgcagttagcctctctcccagcccaaaaatgtacacttcctaactcaatcaggaaggcttggcaaagatgttatttaaattgctccactttaggatgaaagggtaaaagtaagrcttgaaagagttttaagaacaactcagccgaactgagtttaggcaacagtggtcaatatttttgcctgttctttcttaccagggagcaaggttttcctaacagaagtttattgcttataaaaattattcagagaggtctacaagaaaaatgtcatctaaagaaaagaaagaatggccattcaactaagacttccaatttcacctcatccctagatacaatctttatgatgcccaggaaaagatgaaaagtgaatcaaagttctttcaactctcaaatttggtacttctagatttagcctagaaatgtcaggtgacttaatatgtccttcagaatttcagtttgggaaattcagtaccctccctcaaattttggcaattcccaagaaaatttttctgactttctgccctctagtgaagagatattattccatctgcctttttgaatctgttcccgtctttcactccctcttcattctggaggtgaacagtctagatttccataattattcctcatcaccattcagagatgatatttctatgagtagatcaactttattgtgggttgaggtgataaggacaggaggaagccatagtgcagcaccacccagtcaccaacctcaagttattacatagctgtcctgtcttgacatgtcagtcacatcctttgctggaaagttctccctagccagtgctatcttggtcattccctgttgcatcatgatgttaagccctcattccctcaaagccctcctcatgaccaccctttttccaggctgctcccaactcctttcccaagttacagtccagtttttatgaagagtagtgatctgtttaatctctttccaacattatactgaacagagatcacctgtttctaagataaatcctgcctcttatgcggggataaaagcagttaacggtggttgtagttagaaattgcatctttctcttccttccatgctgatactccttcacatgaatacaggtacatattcagataatagtgtgtaccaagcagttttcagtaactcttggtgactttatctcaccttgaagccattgtttctcctttttctttctcaggagagttctctccctcacctcccttatatcatgtaagtccattctctggctttgccccatatgccactagtgcacgttgatttccccaggggtcccatgtagattctctrmacatctttagatgggaaaccgttccatcacaggtgaattccaggggcactgtaggccacagattcaagcaaactctttatgttccaggacaccacagagtaaaaaggacttcaatgaattaccttaattaccagtggctctctgggatgctgtgatcattcatttattcattcaacaaatatttatgtggtgcttattaggcacaggggataagttggtgaacaaggcagatatactttatgcctgtcatgatttgggttcccccaaaacagaccccgaaacaaggattcaattacaaggagtttatttcagggatgataccagtaaattcagtaaggcaatggagaagtgaagtgcagaaaagaaggaaaccaatacaaccaattaccccgtgaccactgaagctcgtcagtgatgtgctagtaaatgcttaacagccaatctaaaaacaatgtggaatatatatgcatagagaagtttattataaaattttgctgatacagaggatatgtaacacaatttacaaataataaaatacacagtattccttattataaattctatgtagccaattgactctcttaaggaaacaatgtttaaactgagatctgaacgacaagaaggcaaaaaataaaaactgaggaggggtggtgaagggtattttcagcagaggggagtagctgaagctggcagtggtgtggcacattgaaggaaagtgaagaaagccatcgtagctagagcacaggaatttggagagaaaatggtgaagctctagaagcatagagctttataagccctgcaaagaatcactaaaaggttttaagaaaaacaatgacacctcaaatttaggtttaaatagatccttctgactatattgtggagaactggctggaggtcagcaaatgcaagcaatcaattagaagagtcttaacggtaattcagtctagaaatgttgatagctaggacattggtgatggaaggagagatgaatagaagtgaattgattttattggtatttaaaaattaaaaccaacataaattctgaatccatgaatggattcagcaagaaaggctggcctgattgatgaataatgtctgtacaggctcattaacagaaagtggtaatatatgtgtctgcagtttctgtaccaggtcagtgaactggttttagccgtgcctctcaggtgttcaaatattgccctcctcttacctctttttagtcagtggttagtgagcacatcctaggagatgctagcctttgctagttctcaggtctttgacagggtcagttttttgcttccatcmttttttgttagctcacatccatacaaaggaaaagactggtaagtatctaatatggtttatatggttttgctgtatccccacccaaatctcatattgaattgtggctcccacaattcccatgtgtcatgggagggacccacccagaggtaattgaatcatgggggtgggtctttcccgtgctgttctgtgatagtgaataaatctcacaaactctgatggttttataaaaaggagttcccctgcccaagctctctctctatgcctgctgtcatccatgtaagacgtgacatgctcctccttgccttctgccatgatggaactgtgagtccattaaacctctttcctttataaattacccagcctcagatatgtctttatgagcagtatgagaacagactaatacagtatccattatgagcagtacttttcattgaactatccagtattttacagaaaaaagcagaggttgataaacacaggaaatagataaataggtaaatggaatgattctagggattcaagatttctatctcagaccttctttaggaaactgtcacccagattactttaaatctattgagctagaggcagctatgcatgctttgtcctcctacacatcctgatttagaggtttcattccaacggcccagtgacttttgttttgttttgtttcccaatttcagttttgggtgtttggcatatttttcactttggatttagcatctgtattctaccccttcttgtttcttcaagtggaccctaacacactgcaggagtggtatttgtatcctgctaactctagctgaagtgctagcacctcaccagtgccagaaaaccagcacacagcagctcaggccaggaggagaggcttgcaccatgccacagagctctgcagcccctcacagactacctggaagctggcttggttctgtttcctttcacacttgctggcactgaaacagttaggacaaacctattgagcgctattctctgatcatccctcagtagtaaacagctctaatgacaaggagaacagccctgcttgaataaacttttaaatgcttttcaaaattaagccactgtgactattttaacaaaaatcttaaatcttaaaaatatatcactcagttatcatgtgtggaaaattgagaacgttttttgagaaaggttactgtaagacttaaggaagaaagacctaaatccccactgtgatggtatttggaaggtaattaggtcaaaggtaagagcctttgggatgtaattaggtcatgagggccgagcccttataagaagagacaaaagagggatgatttctctctccctttctctctctctctttctttctctctctctccctttctctccctttctctctctctttctctctctccttttccgccatgtggggatacaactagaggacagctgcctacaaactaagaagagtgacctcactagacactggtttttctggtgccttgatcttggacttcatggcctcctgagttgtgagaaataaatatccattgtttgagtcattgatctatggtattctgttacgacagctgtcaaagatgtaatcccaatttaaataccaatgccccgttacatatgtctgtgatgtttccgaggcctaaatttgggggtaaattgaaatttcatattaagaactattaacaactaatagttgttaataactaattaacaacaccagaatttccacattcactattctttgttcaacaagcacaaagtctggctctgaaaaggaagattaagttcacaagagacctcagtacacttcccatctatttcctttattcaagacctacacatatgaaatagtgaacaatgtaagatgttatgtataaaatataaatactactttaactttacrtagactaaacagaggtacataattattttagttcagaagaggagaaaaacagtgagaagcagagatatcaaagaaagcactcatggagctttgcttgggttgagaagggtataaaggactttcgtgaagagaaaggagatgaccctccaagtatamtaagtttcataagcaaagctgcagagactggagtgagtttcagggaagaatgctgagaaataagtaggggaaggatatatatcaagcagggccttaaaagtcagaaaaaggagtttgttctgggctttcagaaaatgaaggtggtaatgaaaatggggcttagggaaagtttgtctgcctacagcttggtaggtgaaaagtaggaaagtggaggattttgttctgtatttggtgtgaagctttgggggcatggatacaaaggaaggaaggaagatgatacaagagatattttatttaaaaagtaaaataaaccagggactactttggataatggtggatggagaaggataggtcaaagagtctggatcaccatgaaatgaaacacccccatggtcatctatgttatacacaagacaccaaatttcttttcatgctggagttgaacacctgctgttgaatttcatgctggaatggaacacaatgagaaagagagagagggagagagagatttatttaaggagctggctcatattattgtggaggctggcaagttcaaaatctgaaagttcaaagcctgcaggtggcaggctggaaaaccagggaaagttgcactttgatgcagttcttgttgcagtcgatggtccgaaggccatctgctggcagaattcccttttcctctgcagacatcagtctttttcctattgaggcctttagctaattggatgaggcccactcacactatgtagggtaatctgctttactcagagtccactgatttaaatgttaatctcatcttttaaaataccttcacagaaacatatacaataatatctgggtactgtgccctagccaagttgacacatcaaattaatcatcacagtatgtcttgaatgagctcagcacagtcggaaaaaaacaaggtgccttatacgttatgtcagtaccatatatgcaaagacagaactggaacagacaaaatcaagtcacaattcaacaatctgtctggtgcaaagagaaagcaggtttgcctgacaggatgcacttaattataatataaaagaatgtgtttgtcattgatggtaataggtgtccattcttgaggaactggaaggagctcgtagcagaagaagagaggacaggaaatatgcactcaataatggaaagagaatagagagaaggttgttcagaagggggctggcataggttaggtggtcaaagtggcatctaaccagttccacaattttccattctcccattaatcacttctcaagtgatcgagacatggtgttttcatagctgcaagggtttctgtatcatgttcccttatctggactcaaatgaggtaacatcacagttagggtgagaagtcaagtgtgtctgcctcttttgcctttttttttttttatttccaaggcagagtcttgctctgtcacccaggctggaatgcagtggtgcaatcttggctcactgcaacctccgcctcccgggttcaagcgattctcttgcctcagcctcctgagtagctgggactgcaggagtgtgccaccatgcccaactaaatttttgtatttctagtagagatggggtttcactgtgttaccaggatagtctcaatctcctgacctcatgatctgcccacctcggcctcccaaagtcctgggattataggcgtgaaccaccgtgtccatttttacagaaagtgagaagcatccttcatgcaaatggtttgaggccagagaataaccaaccacagacaaagccacctgtgagactatgaggaagaaatgtcaccttgggttccattgtagggaattgcattagtacaggtatacaatgtgatcagcattttaatcagagaagtagttcttgctttgagggaaagtgacatcttcgaagtcctaaggtagaaataaaaagaatatctgtaatggattggggggcatggatagaaactcctgtgaataatctccttcagtttttacattttaagaaagtgaaacagcatttgtgaaggtgtcagtagattgcaagttgcatgcagttgtcagtttacaggaggggagtctacacaggcaactaagcaaccttctggaattgttatgcacttctgctcaaagtgacgggtcacatcatccatctgaccttaaatatgtaaaaggcaggaaaatgagattgtgtatgtgtrtgtgtgtgtgtgtgtgtgtgtgtgtgtgtgtgtagaggtgggktctcctaatgttgctcaggctgttcccaaactcctgggctcaagcaatcctcctgcctcagcctcccaaaatgtggggattatagacatgaaccaccatgcctggcctgggaaaatgagagtttcatctttaaataggtcccatcaatctcagagggaatttaacattttgactattgagtaaaccaaaagataagaggattttcagcttcttcttctatttttcttccacggcaatgaatgagatagaaaaataactcttcattgctagttggcccgttctctgtattgtcaggttaagtaaaatccttgccaaataatgtgttttagcaggagctttatgcaatttgaaatgctggaacaagtgctaatccacagaattgtaataatatgcttactaaatatcatctaaagtcagcatttccaaaactcgccatacttcattgatagggatgaaacaaatgaaagcactttcagagaagtaaatgaatacatctatttgtttttgtaagtttgtttatttgctttgaatgaccatatgtttattggtttttggtttatttcataaatcgtatatatttaaggtaacaacataatgcattaatatacatatatatagtaaacttattactacagtcaagctaattaacattctatctcttcacatagttacctgttttgggtgtgtgctaagaatacaagatctacatataattattttattttattttattattgagaccaagtctcgctatggcacccaggctggagtacagtggagcgatctcagctcactgcagcctccacctcatgggttcaagagattctcctgcctgagcctccttagtagctgggattacaggcacacgccaccacacccagctcatttttgtatttttagcagagacagggtttcaccatgttggccaggctggtctcaaactcctggcctcaagtgatctgcccacctcagtctcccaaagggctgggattacaggtgtgagccaccatacccggccaagatgtgcatatgcttagagtttaagaaaatatactctttagatcctcaaaccaatcttcattctatgggatagcaagtttgccattgatttaagggcttttcatgagagtttgcaataattttgtcagactttatatctgggacattcttgaatgatctttcagtaaatttcttcaacttggaaagccagagtatctcaagggaagcaaattatgtgcctccctttttgttttaagcatcttatgtgtgttaaatttaaatagatttagttgtacatgatgctgtacagtattcgagaaacaaaaattagccaggcacagtggcacatgcctgtaattactactcggggggctgaggcaggaggatcgcttgagcccaggagttggagaatgcagtgagctatgatcatgccattgcactccagcctgggcaacagtgtgagaccttgtttctaaaaaggaaaaacaaaatgccagaaatgttacagctgagagaactggcagtggtaaggaggaagaagaccagaggaaggaaaagtgagatagaacaaaactgaaatcgctaaaagggccttttaatggtgggaaacatttatttcaatcattggatgtgaagggcaacagaagagggttgaacaaggcttaagaccttggaggtagaccagtagtgaggggtactgagcaagacatccataaaagacacaaacatcaatgctggggacacagtggcttcctggaaaggaaactggaactgcaacttgggcatttccctgggagaagcgatttaaaagagtaatgtttcatgaagaacctgaggtgggaaagaggacctgctagttcagggaaaggaggcaagcagaactagttaaaggaagcaggttcatcttttaagttggacaaagccagactgctattgtgctgtgtacctgtaatctgctatctttcttataagtttcactcatgatttccacattgctccaaggggctgaatattttcagtggtatcccatagaaataagagtgagaacaccaaagggctaatatctagaatctacaaaaaacttaaacaaatttacaagaaaaaatcaaacaaccccatcaaaaagtaggcaaacgatatgaacagacacttctcaggagaagacatttatgcagccaacagacacatgaaaaaatgctcatcatcactggccatcagagaaatgcaaatcaaagcaacaatgagatatcatctcacaccagttagaatggcgatcattaagaagtcagaaaacaacaggtgctggagaggatgtggagaaataggaatgcttttacactgttggtgggactataaactagttcaaccattgtggaagacagtgtggtgattcctcaaggatctagaactagaaataccatttgacccagccatcccattagtaggtatatacccaaaggattataaatcatgctgctataaagacacatgcacacatatgtttatcgtggcactattcacaatagcaaagacttgcaaccaatccaaatgtccatcartgatagactggattaagaaaatgtggcacgtatacaccatggaatactatgcagccataaaaaaggatgagtttggccaggtgcggtggctcacgcctgtaatcccagcactttgggaggccgaggtgggtggatcacgaggtcaggagatcgaaaccatcctggctaatatggtgaaaccctttctctagtaaaattacaaaaaaaaattagtcgggccttgtggtgggcgcctgcagtcccggctactcgggaggctgaggcaggagaatggcgtgaacccgggaggcggagtttgcagtgagcggagatcgcaccactgcactccagcctgggtaacagagtgagaccctgtctcaaaaaaaaaaaaaaagtgatgagttcatgtcctttgtagggacatggataaagctagaaaccatcattctgagcaaactatcgccaaggacagaaaaccaaacaccgcatgttctcactcatcggtgggaattgaacaatgagaacacctagacacagggtggggaacatcacacaccggagcctgtggtggggtgggggcaggggggagggggagggacagcattagtagatatacctaatgtaaatgacgagttaaggggtgcagcacaccaccatggcacatatatacatatgtaacaaacctgcgcgttgtgcacatgtaccctagaacttaaagtataattaaaaaaaaaaaaaaagactgtgtgtcagactgaagttcaacgatccttcccatcttcctgggcaatgacagaggataaaaagtcgtaggaggccttggctgaatttcagctcaggtcaatcttttcactgaacacccctcccagtgaggttttttctttcttaggcaaagaggaatttaggcctcgccaaggaaacacaggaaactagtactgcaatacctaggccttaactgccctattcaatatggaaaatggaacctgctgcttggcatgactcaactgtgagtgcccttcattctaggctaaaaacaaaagaaaaaactgattgtgagaaaagtttcctgagatgtaattataagttaaaagtctcatttatggtgcaatttgatatattgtttcattatatatgaaaggtacaaaattctcctgtttcattagaatcatctgagattttgttggtttgactgcctgttttatttgttttctttttgcttttaagtttgcagccttcacatacaaactaatgtatttctcatttcatttctcccctagggagtctcattttttttttcctcattgttaacatattctgctttctcctatgcaggctgggcaagagatccaatttgacactttatgcagtttatggtaatattccagtaatgatatatttcagccttcattattgataaccactttgcttgataaggacaagttatattaccagcatcattctcctatacggccattttcccaatttcaaatttttctcacaaattcatgctcagcaataaagtatctttctgcagatccccttctagatctgagccttcagtgtcctccatcaattcaaaaccaatttgcccatgatttgatgtatctgtttttctcccctcaatctttattataatagttattaagaccttcagtccatagtgggatttttttttcaattcttagaatactttttcatgaattcctatgcagacttgcctgactctctttcttcttcctcttcacctaatctcaacacaccttgtgtgtaacgtgcaccacccaagtagggctgggattagagtgaagcaagtaaggcactagtgtcaggtgcaaaatttaaaaggagccaaaacctcaggactcaagataatatgtaaatgtaatatttttaaaaattaaagtaccaaagtaccaaaaaaaacccatggtacatggttcatcatttaccatgatgaacacrtgtcaaaattgtaaataaggataggctgttgtttgttttattgcactattttgtgacaggagcagtcatttccaawctgcccatggttcctggcctgtgaggctctttcatccctcttcaggtgggtttataagggttgacatgggcaccaacagatcaggcaatgtgagacttcatatattgttatgttttcttttattaatgcattagcacttttattaactttttctttttggttcaaaatatgagagaatattttgataagtgcatatagaggtgcacagtttcccttttgcctcagaattcagtatggctcagcacaaaccgaaggaagtctcactaaaaccaggtcctataaaggaactgctctccaagctttgtccagcctggagccagataatggaatagtaggattgaaatagtccataaaacaacataagcaatagatacagagtatttatgaggatgacaaarggatttgttttaagtcactaaagcattctcttagatgagaaatttattaatttttttcatgtattgattgaaatataaatactttttagcagaattctgcaattggcttctattttttttcttcyctaatgactcagccaatctgtttaaagttatgatctctgatctggtcccacctggaaaatgctggctacctgtgtgtattccctagccagacagttctgcctttctctgcctctttaaccatacaaatgtggtgtctgggacacccttgttctctgcctactgcatcctctctgccaggggcagcattttaaagtccctttttggtgggaaggttcccttccttagttgatccatatcattcagaatctaaccagaaaaacaaaaccacttcagacattaggttgccatattccagaccaaaatcacaaatatcaggaatttcaaatggctcaaactattgtttacaaaaaaagaaatttatctttatttgtttatatttaaatgacaaaaattgtatatatttattgtgtgcaacattgtgttaggctgttcttgcattactataaagaaatacctgaagctgggttatttataaagaaaagagattaaattggcttgccgttctgcaggctgtacaaacatggcaccaacattggcttggcttctggtgagggtctagggaagcttgtaatcatggtggaagatgaggtgggagcaagcatgtcacatggcaagagtgggagcaagggtaggggaagttgccatgctcttttaaacaactagatctcacatgaactaccagagcaagaactcaatcctagccaaggggatggcactaagccattcgtgaaggatctgtccccatgatccaaacaccttctccagaccccaactccaacactggggattcacatttcaacataagatttggaggggataaatatccaaactatatcaaaaatgatattttgaaatatgtacacattctgtaataccaaaatcaagctaattaacatatgcattattttgcatacttatcatttatttgcagtaagaacactctctacttgtaagaattcaactttttaaaaattcctcatacagtgtaagtcagatcatatggtatttgtctttctgtgcccggcttatttcccttaacataatgtccttcaagttcatccatgttgttacaaatggtagcattttcttcttttttaagactgaatagcttttcattgtgtggacaattttgtttatccattcatttgttttaatggacacttagcttgattccatatcttggcttttattaataatgctacaaagaacatgggagtgcaaatatcttttcaacatattgattgtatttgctttgtatatatacccactagtgggattgctgaataacatagtagttctatttttaattttttgtggaacttctgtactgctttacttaatggttacactaatttacattcctaagaacaatgtgcaaatgttcccctttctccgcatctcaccagcactttttaccctttgtctttttgataatagccattctaagaggtatgaggtaatatctcgttgtggttttaatttgcatttccctgctgattaatgacgttgagcagttcttcatatacctgttggccatttgggtgtcttcttttgagcaatatctgtttgtgtgctttgccattttttagtcaggttatttgcttttttgccattgagttttttcagtttcttatatattttaaatattaattgcctttcagatatatggtttaaaatattttctcccatttcttaggtttatcttcactctgtttcctttgctgtgctgaaggtttttagtttatgtaatcctgtttgtctattttcacttttgctgcctgtgcttttagagttgtatccaaaaaaatcattgcccagaccattttcatggagattttctcccttgtgttcttctggtagatttagagtttcaggttttacatttaagtctttaatccattttgagttgatttttgtatatggtgtgagatgagggtctaatttcattcttctgcagatggatagccagttgtcccaaaccatttattgaagagactgtcctttccccattctgtgttcttggcaaccttgtcaaaaatcaattggccttaaatgtgtgcattttatttctgggctctctattctattccactggtctgtatgtctgtttttatgccagtaccatgctattttgattactatagcacaaatacacaggtcattgtacttcaaaactgtccctttattagctgcacttaattaaaagagaaggctctctccctctgtattaattctaaagttgctataggattgcttattcattatattgcttagtattttattgaaattgatagatttggggggcccagggatatatttccttgtcaccccaatttatcagtttcaataaagtactaaactgcataatcatttgagatagttcccatttagtgctgacatcttctggatgtagttatccattttagctgcmcttgaattgcagcaatttcactctatctttttacactaactcttacccattttcttgttttcctctgccccagggacattctctagatgaagggatgactgactaaatggatggagggatggatgatagcagatgaatggatgttaatgataatgattatgtcactagattttaaagatgagggtgttcctcaccctttcttttggtgacagtagaaactatataaagtgctatggttaatgcagaatcatagctacaaaatgtgaacctcctcaatgtaacattttctcttcaaaccatagttaaaatgttacattaaaagtaaaaagaggtgatttgctcagaaaaatagtcattatttgggcattctttgttgcaggtgaggagagttgtttgaatatatatatacacacacatatatatatacacacacatatatatatacacacacatatatatatctatatatatctatatagatatatagatagatagatagatagatatacacattttttttttaagatagagtctcgctctgtcacccaggcacgatctcagctcactgcaacctccgcctccygggtcaagcaattctcctacctcagcctcctgagtagctgggattacagacatgtgccaccatgcctggctaatttttgcacttttagtagagacagagtttcactatgctggccaggctggtctcgaactcctgaccttgtgatccacccaccttggcctcccaaagtggaatacattttctttattcagatggtaaataacagtctgttgcctgaattattcagattttcttcttaacgttcacatgacctcagcattcaggctttgcagaatgctataaattcttcccccaccaccaccttcatcctacaatatatcctataaagctgaatttttaatggcttaatgttaatatatgattaggctatgatttcttcaaatacagtttgttttccttaatcctgaaaatttctcaaaatcttctgtaaaataaaagtggaagaaatatcatattttaaatagaattgtctgttccaagggcctgaaattaatcaggcatgtaatgcactaaaggcagctcaagtaccttttgtaaatcacttgaggatgagtaatacttagaaatttgggtttgaaatagctccttctggaactactaaagtgtcccccaaaaagttgatgcttctaaactatcttttaaaaacagacatttagaattagtctcttgcattctttccttctttgcactcaacaattccctctagctgatagaatgtgatgtgctgtagcaacatcttcaaaacatgtatttacagaaccaacttacagaatgctttgacgcaggaagtgattatttgaagtggctgaaatacaaatgtcttctatgactgtaacttggcaaaagcactaaaaactatcttaccagttctctttttatgagggatttatattccattaacatctaagcaaagaaagatgttgactagcttagactgacaacacctggaaattcaaacatgatttttcacatgtatttgctttttaacaagttcttcagctatacagcagaaaaagtcatttatttttcccaaatgacactccttgatgtaaaatgcattttaaatgtcaaatggaagaacgcctctaaaggaacttcaatgtgatcacattatggattttttactcatcggagttcaaagctactgactaaagttgaattttcttccctttaattaaattaactctaaagcagcatttcctctttatggactttactagattttggtattaagcatagaatgtttgtgtggttcttcttgacttaagactttaccagcagactatctataatgaaaagacacctgtggatcattaggatgtaagaggcttgagggcagaagaaaaatgctgtagtatatcctccacaggggcagatcaggaccagggctgcatcgcagtgcttcatcactaaatttccccatgacaaattgtggaacctttcctctaccagtgttctcaaactcttccatgaatcagaatcccccagagggcttcttaaaacactgacttctgggccttaccttcagtcttactgacttagtaggtctggagtcaggacaaatttgcatttccaacacacagggttctctagagggacagaactaataggatatatgcatatatgaaagggagtttattaaggagaattggctcacatgatcgcaaattgaagtcccacaataggccatctgcaagttgaggagcaaggaagacagcccgagttccaaaacctcaaaagtagggaagccaacagttcagccttcagtctgtggccaaaggcctgagagcccaagtccaagagtccaaaagctgaagaacttggagtctgatgtttaagggcagaaagcacccagcacaggagacagatgaaggctagaagmctcagcaagtcagcttctcccaccttcttctgcctgctttatcctagccacgctggcagtttttggatggtgcccacccagattgagtgtgggtctgcctttcccagcccactgactcaaatgttaatctcctttggcaacaccctcacagatacacccaggaacgatrctttgcatccttcaatccagtcaagttgacaatgttaactatcacacctgtatattattaatatcctactgtyttccatgtgtttgcacacrccattttcctttcctgatatacctttaaacctcatgtttaagtcttttcagaaaaatgtttcataaagtttaatttacagtaaatcaggatggattatcttttatatatacctaatgtatactgccctctatttcatattcataaatccaatttctccttcaaattttcacattttgtggcacatctttttaaatatccaccattccgtaagtgtgtgatcatgtccgaaacgatcctgcttgaagcatattaggcatagttgatcagacctactcttcaggtggtacccgagtagctaatcccccaatacaatacagtgtggaatcagattttcatttctcatccttttttcaatctgctttttcttatttcaaatactttgactcttcagtctttcaatttctccatttgccttattaatttcagcattagcctcacaaaggcctgtggtttaacagggtgagtggctcttctgagacaaagttcattgttaataaatacagttactcttttgttgtgaaattttatgaggaatataaacaatgcttttgctaaattggcagaattgctatcattaaaatatcsctgatgtaattttcyttaactcaaaacttctacagtctgtgttttcattgcaaaaatgaatatctggactccttgcttggcgtttactaaaatatcagcttctggactctccctaaccaaactggggtgagaaggagattgttagtagacctgcctttctcagcacttcaagacagttataccacttgggaaatgagataacagtggttttgagatccattattgacaatagaagactgtcctttctttcatataatgtgttaggaaatccacatgcccctgatcagcagggccattgtcctgtgcaacaagtggcattaattcacaaaggttcagcactgccacttcattggatgtcccctctccacaccccttttccatccacctctacacaacatatattggctgtagcaccttgccaagctaccaactgtcttttgagactatgagtatattgctccaatgtcagccttattgaggacctcatcactgatactatattaagagtttattaatcttggtggggtgcagtggctcacgcctgtaatcccagcactttgggaggctgaagtgggcagattccttgagcccaggagtttgagaccagcctgggcaacagggtgaaaccctgtctgtacaaaaagtagaaaaaaaaaataggtaggtatggtggcacacacctgtagtcacacctacctgggaggctggggtgggagaattacctgagcccgaggaggtggaggcttcagtgagtcatgttcatgtcaccgcattccagcctaggcaacagacagagaccttgtcctccccaccccccaaaaaagtgtttatctttctatgccacagtttgtctatctgcagaccggggataataataccttataaattggctgtgacatttaggtataatgtacaccaaacgtgctcaataaattggagttgttgcagtatttttaactactgtaatcacctgaggaagggaatatatttatcttatttattgttattgccccagtgacttgcaagtacatggaaaatagtagatattcaataatttttgtttaacaaatataagaatccatacccaaatgaatgaatgaagccttggcaaagaggaaaacaacagcttttggctcttttgtggaaataaaaggggtatgttaaggaaactgaactttagtactgaacctgccatagttagttttgagtaggagttttcatttttctgagctttagatgcttcatctgcaaatgggctaacaatgcctaccttgcctttctcagaggggcattaatagatacaaatgaaataaagagcatatagaaaagaaaacaatagcaaaatacgtcaacaacaaaagagtgtgctggaacttattaaaagcaaagatagagaaaacacaaaaatgcatgatcttgggtacaaagatgctctagtgcagcaaaggtgcagcgtgaaatggagccaaacatacaacacacaaagcagaagagggagaaccaagacaaaaagccaaagaaaggttttcgagtattaagtaattgacattgaatcaaataatgggaaaagttttggtttattgtgggaaatataaatttgtatataatgtaaatatttataatatttactaaaacctttggggatcataatggataccatagctccccctataatcccagctaccctgaaagctaaggcgggaggactgcttgagtacaggagttggagactgcagtgagctatgattgtgtcactgactgcacttcagtctgggcaacaaagcaagaccccatctctaagaaataataataatggataaaatatatggaagcactttttaaggtataaaattttattatttttcaaagagtgaaattacttggtgttttgtagctaaggtatcacatttaatgagtgtaccatgaagtcacttcagataatttagagttcctgcttagaaaagactctccaagtctgcccatccataaaccactctgagaaaatggaaaataataacayttcaaagtttgttgttagcactgataggtctttagtccacctcgagttctttatgaaatgaaatgaggtttaaataaataaaatgtatgcttgttttttgggggkttttttttgttttttttttttttgaggcagagtttcactcttgttgcccaggctggagtgcaatggtgcaatcttggctcaccacaacttctgcctcctgggttcaagcrattctcctgcctcagcctcccgagtagctgggattacaggtgtgcaccaccaggcccggctaattttgtatttttagtagaaacggggtttctccatatcagtcaggctggttgcgaactcccaatctcaattgatctgcccgcctcagcctcctaaagtgctgggattacaggcgtgagccaccgcgcctggcggcttaagtctttagcagcaatcttaatctgccaagttcctagcaattagaaagactgtaagaaaagattaattaaagcaatttatagtcttctcatttatataattggatctttcgatcatgctttaaacttaaaaaactacattattgatattatcacagatgtcctagctattatttattgtatgttttatatcttaaagtaacagctgtccttcaatatacaaagaaatttttttaaataccacttcctcaaatttaccggtattcaatcatgactacacattagaatcacctagaaggtttttcaaacacacccattcaaggccctctcctgaggtcctactttaattgatgacattctgaaactcctcaggattcttttttttttttttttaagacggaatcttactgtctgccagrctggagtgcagtggcacaatctcagttcactgcaagctcctccttctgggttcatgccattctcatgcctcagcctcctgagtagctgggattgcaggtgcctgccaccacgcccggctagttctttgtattttttagtagagacgaggtttcaccgtgttggccaggatggtcttgatctcctgacyttgtgatccgcccgcctcagcctcccaaagtgctgggattacaggcatgagacaccgcacctggccaaggattctaatattcactcaggacaaagaatctctcagccttttgctggttttgttttttcatttttgaaacaagagtctcgctctgtcgcccaggctggagtgcagtggcacaatgtcagctcactgcaacctccgcttctgggttcaaatgattcttctgcctcagcctcccaagtagctgggattacaggcatgcgccaccacatctggctaattgttgtatttttggtagagacgtggtttcaccattttgctcaggctggtcttaaactcctaagctcaaagtggcctgccttggtctcccaaagtgctgggattacaggtgtgagccaccgtgcccagcctctctcagccttttgattcacggtctccaaatacctcaactgaattccattaactacctttggcaaatgttaagaaataacttttaaggggtaaaataatgaccctcatttaaatgtaaaatgaacacatattgaagattttatttacctcattagttaatgaggaaaccaataagatgttatcattggttccaaaaataatccaaagaacagaccaaacataacccaggaaccagcacaatatagccctgaaaaccaaatccaacctaccgtttgtacagcccgcaagctaggcatgctttttacttttctcagtggttccaaaaaatcaaaagtattataatattttttgacatatgaaaattatatttaattccatttcagtgctcataaatgaacttttattggaatgtagccatgcccattcacttacgtatagcctatggctacttcagagctacagcagcatagttgagtagttgcaatagagagcacatggtctatacagcctaaaatatttatcgtttggcccttgtcagaaaaagtttgccaacttctgatataagcaatcaggaatggtgatacaaatttgcaaattcatgcaaaactggttaaaatccacccagcaataaaatgtaatgttgaaattgtctctttcacagaaggaaaatcgatggcatctccattagacaaaattcacttgcattgaattatttgcattaccattagctttttatagtttgtggagttgtaaaatagctcagtgagagacaacaaaaagcacagaattgtctaaaattagataactgccaaaggtatgctaggtgatactcaacattccattggaaagacacctagtaatcttttaaacccatttcataatctttcacaattttttccggagacaaactaaactacattaattttttcaggacatcagagatatgtcctgatcagaactgactttgttccaggtatgtctgggacatgaccggaccccatatctgctttataacacatcttctctgcctgctctagaagcctggcacatgccagtgactgagcaccactgactgatccttcactgtgagcttctcattcacagaccaaacacaaatcattactgggtatgttgcaaagtactctgtgtaaggggctaccaagatgtagacccaggctctgccttcagggagcatatatgttcctggcacaggcacatccaagtcaacagatacatccattttagttctgattcacttgtgattttataacttcctactttcccaaaagaaaatcattcttcttctaaaagcctacttatactgcatttctttcacttactgatagaaaaacaacactgcataaaaaccaagcctctgaatgttctctaaaatttatctttgacttttaaatcaacctttattttcatttaaactgttgaatatttgttgcaattaagaaaatcccggccaggtgtggtggctcatgcctgcagtcccagcactttaggaggccaaggcaggcagatcaccagaggtcaggagtttgagaccagcctggccaacatggtgaaaccccatctctactaaaaatataaaaattagccaggcatggttgcaggcaccccatctctaccaaaaatgtaaaaattagccaggcatggttgcagattgtaatcccagctactcgggaggctgaggtaggagaatcgcttgaacctgggaggcagaggttgcagtgagccaagatcacgccattgcattccagcctgggcgaaacttcatctcaaaaaaaaaaaaagaaaagaaaaagaaagaaagaaagaagaaagaaggaaggaaggaaggaaggaagcaaggaaggaaggaaggaaggaaggaaagaaagaaaagaaagaaagaaagaaagaaagaaagaaagaaagaaagaaagaaagaaagaaagaaagaaagggaaagaaagagggaaagaaagaaaagaaaagaaagagaaagaaagaagagagagaaagaaagagagagaaagaaagaaagaaagtcctcattaaaaataccttcagtgtttttgtaatattcttatgaaagccttttatagagtaaaaaattttccaaatttgcactaaaatgtttgcattatcttaaaaacagctcttgttgctttgatctttgcagttcacagtcaaaattatttaaggtcattctctgaagggactatcttgaagccaggctgcatctctaacattcacatgtttgatttctacaaatgatcacagcttgtggttcttcaaaatacagataactgcacttgataatttttgcttttttaatatatttggctttgctcctcaccacattcctaaagcagacatggcagatcttatcagcctcatttcacaaatgcagatccatcagctaatgagagttgttaggtctcccttttatgcctcccaaagtaccctatgtgtcctctttagcagcacttggcatgctttcaattaaataacataatgctccaagactcaaagttccctgaagacaaaggctaagtctgttgtgttcaccaccctagcctcagtagtgtagtgaagtaaattctggagtctgattgtgtgccctgatttgtgttcaaaccccagcccaacaacttataaccttgggcaatttacttaacctttctctgtgcctcagttttccatctatgaaatgataatagtacttattcatagggttcttgtgaagattgggttaatatgtacaatgcttagaattatgcctagcatgtaccaagtactcaaaaaatgagagctgtttttatcatctagtaaaattcctgacacaaagtcaacaggcaataaatatttgttaaatgaatgaatgaatgagcaaagtaaaagcagaattgaatcaaacattcaaatagtctaaatccaatgccattttcctctccttctactcttggatatacagaaagatcagttttgggcgggggggaaagtaggattgcagccaggcacagtggctcatgcctgtaatccggacactttgggaggccgaagtggaaggatcacttgaggccaggagtttgagaccagcctgggcaacagagtgagaacccgtctttacaaaaataattttaaaattagccaggcatgatagtatgtccccgtaattccagccactctagagactgagtcagaaggatcactcgagctcgagctcaggaggccgaggctgcattgagccatgattgtactactgcattccagcctgggtgaaagaatgagaccctgtctcaaaaaagaaaagagcaggattccagcaagccattaaacactgattccactgattctctataaaaaatgatcattagattagtgaaaaatttctcttctccaggtttactgttccagtccttgactttaagcctcaataccaataagatagccataaatgcaactctagcaattgacttaaattactattttatgctggtacatagtagatgttcaataaatgtttgaaaattgattgatttaaagaatgactgaagaatggatatgtagatataatttggtaaagttcgagtataaaacagaagtgtaaaaaacaaaatgtatcagacaaggaaggacagttttattcagactattaaaattgggagactgttcattaattaggcatgtctcaaagaaatggactgcattttatagaggcaggtaaacaagggagttacccacaagtcttacggaggtcatgagaaagagtggacagcaggtcttattaagtcatatgaagaagggtgcttctttgtaattagcccttccttcccagaacaaaaaaaaggggagagaggatttcagaaaacaaaagggttgggatgggttatgggtgggtgggcgtgggtgttcttggtagctattttctgataaagctcaggtaaagttcaacattgtcaggaacaattcttgatagaagtgatacttctttacagaatgtacgtatcttgcatgttggttgggagggaacggggctgggcactttttggttcctacagtaatgggtggacactgctaatatatagtgggaagagtaattctataatatgcaggacagtactgcacaacaaagaattcatctgcttgcaacaagatttatatatataagtggacattcttgtatgtgaagataaaaactacaacttttcaagcctagactaactcttgttaaagtaaaactttattaaaaggtaaaattacagctgtcatgcaattataagatgaatacgtgccaaaggtcatgtttaataaactaattaatgaggaaccaagtaagatattacaaccagttcaaaggagaattcaaacacacaatcagcaaaaagaaatgaggraataaatatacaagtagatacaaagctggtcagtatccacaaggaaataatcaattacattccacctgatgaaaatcctttgcatttctatgaacaagaataatttgcactactgtaaatattctaccactaagaggttgcaaagacaatatagaaggcagaggtccctatgaatcagttagcctggaaggtgcactagataagacactgaagtttttcacattttttcctgacactcctttttgcacttacatgtgatttgtaaagtatatttctcaaaatttatataaacctgaattttctaggaatgcaatggatgtgtaaattaaggggaggttaaattttgttttgaactactaagagttaactgtcatttcagaaaatcacttctcttatgaaagtagagatgatttttttttattattattatactttaagttttagggtacatgtgcacaatgtgcaggttagttacgtatgtatacatgtgccatgctggtgcgctgcacccactaactcgtcatctagcattaggtatatctcccagtgcgatccctcccccctcccccgaccccacaacaggccctggtgtgtgatgttccccttcctgtgtccatgtattctcattgttcaattcccacctatgagtgagaacatgcggtgtttggttttttgtccgtgcgatagtttgctgagaatgatggtttccagcttcatccatgtccctaccaaggatatgaactcatcattttttatggctgcatagtattccatggtgtatatgtgccacattttcttaatccagtctatcattgttggacatttgggttggttccaagtctttgctattgtgaatagtgccgcaataaacatacatgtgcatgtgtctttatagcagcatgatttataatcctttgggtatgtacctagtaatgggattgctgggtcaaatggtatttctagttctagatccctgaggaatcgccacactgacttccacaatggttgaactagtttacatatgaagttattaatagatagaagaatgtgtcgattattttgctttgcaaatcagagctggaaaaacacaaccttttcaatagtattggaataaataattcagatgctatccagaattgaactttgatcatactattaaaaattacattattgcatgtcaaatccatatyacaattacttcatttgtcccaaaattttcttctccagagaaggcaattacraattttaaggccaccaggaaaccaggaagtgacatgaatgggctcttttccaaatgcatactcacactttcctcatatargggctgattataaactgaaagcaattagtgattatgtttttcaaaatgaagacagaaagtaacaaggtatgattgggactgagctctttagtttttatattatatgagataatgtttaagtctaataagatttcacagattcagcacgtttgtttagtgagggaaagtgtaataaattagactggaaaaatggcctttagtgctttaagaagggaaatgcagcatattaaaaaaaaaaaagaagtttgaatttcattttaatgatgaccactgctcaaggcaacacccatctttgtagccttgggctgcctctcttaattacgcattttaatcacttagaaaaggcataatttaaaaatacttcaaggactccaaaaattaacatcaagtaggaagtgcagagagtttataaagtggcttggggcaaatggagaatttttttaaaatatcctttgtacagtgtctagaacataaaggtgccaaataaataatagtttattatcctatccttctatcccatcctcaattctgcctcccaagattctaaaagtggattttaagactgtaacctcatagaaacatctaactaaaataggaagaaaacacaatgaagtttcccagggcttaggaattaaatttattaccagttttagttttactccagatgttttttaatgttattattaataatagaaagatagtggtaaaatatttttcttctatagtggttctgcctaagaccttttcttagaatatagatacgtttgaaatttcatattttttccaagtaaccaagaagcttttgtgctgtttgtttgtttgtttgtttgtttgtttgttttttgagatggagtctctgtcacccaggctggagtactgtggcgtgatcttagttcactgcagcctctgtctcatgggttccagcaattctcctgcctcaacctcctgagcagctgggactacaggcattcacccagctaattttgtatttttagtagagatggggtttcaccacgttggccaggctggtctcaaactcctcacttcaagtgatcctcccacctcagcctctcaaagtgctaggattacaggcatgagccaccatgtccagcctcacagaactatttttaattaacaaataaaaattatatatatcacatacatgatattttgaaatatgtacacatatttcaatttttgaaaggctcatttgggctaataatgtatgaattatctcacatacttgccattttttgtggtgagggcattcaaattcccctctcttagcaatttttaaaatacaatacgttgctattaactatagtcatcatgttatacacgtgatctcttgaacttattcctcctatctaactgaaattttatatcctttgacccacatctttccaaaccacagcccctccccctggcccctggtaatcaccagtttactatctacttgtatgagtttgacttttgtagattccacatataagtgagatcatgyagtatttgtctttctatgcctggcttattcactgaacaggttcattcatgttgtcaaaaataacagaattttcttcttttttaagcattctgttatgtatatataccacattttctttagtcattcatcgatgaacacttgatttgatttcatatcacagactaggtaatttataaagaaaataaatgtattgcttgcagttctggaggctggaaagtccaaggtcgagggtcctgcatctggttgagggcctttgggctgcatcatctcatagtggaaggcagaagagcaagagagggtgacagcaagaaagcaataaataatgctgcaataaacttgggagtgtcaaagtttacaaaaaatctaaaaataacatctatgaagaaaacttaatatgttgagaggctaaataataagccttttttaagttagtgttattttccctaaaagtgaaaaatagtaaatgatggagaaagtaaaaaaaaaaggctaaaattttgctactcagaaataataaaataatatctatcattttagatatcttacaatctaaaaagaaagaggtatttagcattttaaaagataaaaggatagatagaagtatcttcacaaaagtagaatttttctacattgctattctaataaaatttactaaatttaatttcacttgactttaacagaataaaaaaggaactgaaataacaccaaagaaattgctgaattgcagataagtattttcttatatcataaggtatttattgttaaaagatctctagcaattaagaaaaaccacctaaaatattaatttcatgtaattatgatttacactacacattttaacagtagatagaattttttatgtaatgctatgaaagataaaattatcagaacactggtagtctacccatcttcactcctccacactccaagttttggtaattaggtttgtattttaccattgtcaaggtttacaaatttagaattgcttctacaacaactcccacagcttcttggacagattttcatatttaaatagatttaggtctcaccctcaaaccttctatcccacagcgtctccattcctgagttctgtttgatttatcttttggttggctggaatataccagcaggcaattgtttcaaaaagggttcatgggttccatagctcctgagggctcaactacttattgcctgtaacttccaaatgtgaaggacaatgtggctaaatatcaaattcttgaaccactctttctttcacttacaactttgctcccttgtcttcagctatgtgatcagctgcaataaacatgacactagcatgatttttctggcaatttctgtatggcttcctttttctaactagatacccacatgttttttgttttgttttgttttctttagctttcctttgttttaatccttgagattcaagacttttctttcttgaggggtgtcttcgttcatttgggcttagttcatgaggtataactaaatacctcatactgggtgattatacacaagtttatttctcacagttctgaagtcatgggagtasaaaatcaaggagctgacattgtgtctgatgaggtgtctgttgaggacccacgcctcacagacggcacctttttactttgtcctcctgtgttggaagagactagctagctctctggagtctcttttataagaatgctaatcctaatcatgcccttctcacccccaacccaccaaaggcccaacctcttaatcataatcttgggggttaggatttcaacatatacattttgggaagatacaaacattcagaccatagcaagggataacttgccatggataattccattttgaatcatttcttgatattgtttgggcctctaaattccattttttttttataagaagtcttgctcttgtcacccaggctggagtgcaatggcacaatctcggctcactacaacctccaccttccggttcaagtgattctcttgcctcagcctcccaagtagctgggattacaggcatgcaccaccacaccccgctaattttttgtatttttagtagagatgggttttcrccatgttggccaggctagtctcgaactcctgacctcagatgatctgcccacctcggcctcmcaaagtgctgggattacaagcatgagccatcatgcccggccttgtttgttttaatgtatcagaaaaatttttctcctgtcatakgtttgaggacttttcctaattcacttgttatgttgttgtcttattgaaggacacaaattacataaatgtaggctttcttttgtctttcttctacattttatcctgtcctctatgatcagtttctgaactttgttctttttcatatcatttttaatgatttcttaaagcctgtcagtattgacctggctgtcttcagtcaaattgttttattccattctatgttactgtcacaaaataccacagactgggtaatttataaagaaaataaatgtattgcttatagttctggaggctggaaagtccaaggtcgagggtcctgcatctggtgagggcctttgggctgcataatttcatgatggaaggcagaagagcaggagggggtgagagcaagaaagcgagagggtcaaactgccttttataacaacccaattgcatgatcatggcattaattcattcatgacatgggagtcctcatggcctaatcatctctaaatactgccacaataacaattaaatttcaacatgagtcttagaggggacattcaaataacagtacatatttagtctatatttttaataatgttttttaataaataaaataaggacatcatttaaaaattcaagtagatttccacccccaggaagatgaaatgaatgtacttttcctcctaagtgtatctaaataccctgatattatatacaaaacaaatatgagaaggctctgaaaggtaaagagaagaagatggactaactaggaaccttagggcctaaaatatgacatgatagtgagtttcctgagttttatttttgtctcgtatatcctagacggaacaaagtagttgaataaataatggctctgcaaaggacactgttaagaggatgagaagaaaagatacagactggcgaaaatctttgcaaacatatatctggtaaagaacaagtgtgtggctgggcgtggtggctcatgcctgtaatcctagcactttgggaggccaaggcgggcagatcacaaggtcaggagatcgagaccatcctggctaacacggtgaaaccctgtctctactaaaaatacaaaaaattagctgggcgtgatggcaggcgcctgtagtcccggctactcaggaggctgaggcaggagaatggcgtgaacccagaggcggagcttgcagtaagccaagaccggccacactgcactccagcctgagcgacagagcgagactccgtctcaaaaaaaaaaaaaaaaaaaaagaacaagtatgtagaaaatataaacaattctcataacaattaaaaattccagtagaaaatgagcaaaagataagaatggacattttaccaaatagggagggacattttacctcatatacagatggtatataagcacatgaaaagacgttcagatttttatttattagggaagtccaaattaaaaccgcgatgagatatcattaacactgatcagaatagctaaaattaaaaaaaaaaaaaagtaacaacaaatgctggaaaatgcatttggatctgtatcacttatacattgctggtggtggaaatgtaaaatagtacagcctctctgtaaaatagcttgataatttctccagaaatttaacatacggctaccatgcaagctatttcattcttgagcatttattatagagaaagaaaacatgctcacataaaaacctgtgcatgcatatttatagcagctttatgttaaataacccaaaactagaaacaacccagatgtccttcaagagtaaatggttaaaccatctgtggtacatctatataatgtaatactactcagcaataaaaaggaacaaattattgatacacacaatttggatgaatctccagagttatactgagtaagaaaagccaatcccactgtatttttccatttatataacatccttgaaatgacaaaattatagaaataaaaaacacattagtggttgccagatgttaagaagggtatgggtgggagagtagaggtgactgtaaaagggcaacatgaaggaatccttgtgatgatgggaattgtctctagattatcaatgtcaacattgtttgatattatgctatagttttgcaggatgttattaggggtaatgagtatgcaaattctctctatattattttttcatttttctctctctctttttttttttttttttttgagactagtctcactctgtcacccagactggagtgcagtggcgccatctcagctcagtgcaacgtctgcctcctgggttcaagcaattcttatgcctcagcctcctgagtagctgggattacaggcgcccgccaccacacctggctaatctttgtatttttagaagagatggggtttcatcatgttagccagtctggtcttgaactcctgacctcaagatctgcctgcccctgcctcccaaagtgctgagattacaggcgtgagccactgtgcccagcctattttttctttatggagataaaattcacataacataaaattcaccattttaatcattgtatgtagacaattcagtggtttctaatatgtttacaatgttatgcactgtctaattccagaaatctttcatcatctccaaaagaacccccataaccagaaagcagccacttcccgattagccttctcttcgtgcttttgcagaactttgaaggtcagacagagatgagaatttaatgcccagaactatatgcattcttaggtccttacggagcatgcatacagccctgggcattaaagtggccctctagattccccaaaatatgtcagagcttttgaaagtgctttttccccaaagcatctcattccccagcctttcctcccaagtttttgcttagtctattgtgtgcccagctgttatccattgcctcacacagtagcaattagtgcatttgcctgggtgtttttgacaaactttccccaggtaaccattttagcatcaggagagttcctagttaggaaagataaaggccagccttttgagttggtattccagggagtcaggttgaaacaaataagtaaaactctttgtcagtgaggtccattctgctccctggagtactgctactggaaatgagggctgttattttcaaggctaccactgagctggggagtgggggataacagggtaagttaaaaatgccacaaagttcactgttcttactgagatttagctgttgttcttaattaagcattcccttgtttgctgcaagcttttgtttagtttccagaattctgaaaaagtcaattccgacacttttcaccagctttttattgaaaggacagacttttggagcgtctaactctgcaattttcacagatgttactctctgtattatttcttataactgcgtttgaatctacaattatctcaaaataaaaagtttaattttttaaagtcaaatcatattaacaaaatcatgacaaatacagcattttactatctcacacctctttactgtgcagtaacactcaccaaaaacaatgtcttttaactcagtcccttttaactcagctgttttgtctgacatttatttttccccatatttttaaataatatgcatttttgactcatcgtttcatacatcatttattgacgttccattattgtaggtaaagagttaagtttcttgcaataccatcccctctttctctcttcaatgttcccaatatagtgatattttattattaaattagtattcagtatttatagtaaatattctcagccaatcaatctgctgtgtttcctttctgttttcctggagttaatgttttctgtgattttttttttttttcctggagacagagagtcactctgtaggctaggctggagtacagtggggcaatcttggctcaccgcagcctccgcctcccaggttcaagtgattctcctgcctcagcctcccacgtagctgggactacaggcacgtgccaccacacctggctaatttttgtatttttagtagagttggggtttcaccatgttggccgggctggtctcaaactcctgaattcagatgatccacctgcctcagcctcccatagtgctggggttacaggcatgagccactgcatcaggcttatttattattattattcacttagttttctttgtrcttattactaattcttctcaaactttccattgcaattgtaatataccacctctttctctctggacagctactctctaggacttttggaccgctgtcttctgggtcttccctttgctacctgttttgctatcttggattttccttggcctttctcccagtttggattccttgatcccttctccctctgggtttattctcctgttctgtggaacatttcatccagtagttttgtcaggttaagaaatttggtacacaccttttatttgtcaattatgccttaataaagctggaaaataaattgttgctggacatgatgggtcatgtctcccaacactttgggaggctgtggcagaaggatcatttragcccaggagtttgagaccagcctgggtaacatcgagagacccccatttctacataaaaaaaaaatttttttaattgctgggtgtggtggtgcatgcacatggtcccagctactcaagagaatgaggaggaaggagtgcttgagacagggagtttaaggctgcagtgagccgtgatcatgccactgcactccagcctgggtgacaaagtaagaacctgtctcaaaaaacaaaatggcaaagaaatcttttaaaaattggtacaattgcagaagtcttggtgaaagatgcattcaatgtacctgtctcttgagatgaatccagtttttaactggttgcattttacacctgggtaactgtgtatttcaaagtcccctttaccatttcctggagatttccctttccctgaacatttttcagtatcccatttctttctttttcttggtttacaacctcattttaggtaaacacacgctaagaaaaggtgcctgggaaaaaattttaagactgtgtgcttgaaaatgtctttagccaccctgacacttgattgatagtatagaattccactgtggccatgctgttctcccagctagctgctccctgagcatgacaggcattcttcttcttttggccttctcacttgcatttgctgcatggctaactcatctccttcaggtctattctcaaatattatattctcaatgacaactgtataaaattggaaaccctgtacttccatccccttttctgcctcattttatttccatagcacttatcaccacctggcgtaccatgtatttttccttgtattgttttggtttttgttttgttttttgtcttccaccactagacagtaagctctttggggccagaattttatctttgatcacttatatattttagcacctggaataatgcctggcacatactaggctatcaatgtctatttgttgaatgagtggataattaacattttctatctctataatattccaaaaaggaagataataactttcttgttattataaataagaatggatttgtttgatataaaattaagaatttgctggtcatgccccttaaagatataaaggagttggatggaatctcttcttttgagagtttttgacatgaataagcaaccacttgatgcttatggttcagcatatatatgtgaccctttctagtagcatttaaaatagcctttcatctgtacttgttcctcacacactgttcatcttctgctttgtcttcttctggctactaatggggcttctggcatctcccacccacatacctcactttgggcttcagatggacctgagttcatctactttgggttggaccatwtcatttgtggccttgcctttggacagaactccaacctggaaagtgaccacaatagctatatactctacatttggcagctggacttagaaacaatggactgccacatacacatacacgtaaacacactccataccctcacagacccacacacgcactctagcataacagttattttaaatcttttcattttgcatagttcagagtgaaatgaatggccttggcttttagtgtttgactttcctattgtagtgcaaaaatacaatgttggactggtctgtgtcactactatgtctaattttttcatatgaattagatgaaaacatgattatttaaaatacacttacaaatagtgataaggtttggataatatttttccaaaggaattgactataaccttaraagcttcaatctcaaaacaaaagagagtaggagtcttttaaaatcacatttaaatagggttgctggactcagcaaagaaaaatacaaaatgtccagttaaatttaaatttcagattaaaaataataatttttagtaaacgtatgttccaatgagcatcctgtattttatcaagcaaccctataattaaatagcaaattgttcctttaatgaawtaacttggttaggtttattgtgaatgtgagrgattaatattaagatgtcacaaaaaacatctttttttcggctggcaagatggccgaataggaacagctctggtctgaagctcgcagcaagatcaatgcagaaggcaggtgatttctgaatttccaactgaggtacccaactcatctcactgggactggttagacagtgggtgcagcccacggagggtgagctgaagcagggtggggtggggcatcacctcacccaggaagcacaagaagttgggcaactaccacccctagcaaagggaagccatgagagactgtgccgtgaggaacggtgcattccagccagatactacgcttttcccatggtcttcacaacccacagaccaggagatttcctcaggtgcctacaccaccagggccctggstttcaagcacaaaactgggcagccgtttgagcagacactgagctagctgcaagagtttgtttttcataccaaagtgttgcctggaacgccagcgagagggaactgttcactcccctggaaaaggggctgaaaccagggaaccaagtggtttatctcagcagatcccaccccccatggagcccagcaagctaagatccactggcttgaaattctcactgccagcacagcagtctgaagttgaactgggatgcttgagcttggtgaggggaagggagtccaccattacttaggcatgagtaggcagttttcccctcacagcggaagccaccaagaagttcaaactgggcggagcacactgcagcttggcaaagctgctgtagccagattgcctctctggattcctcctctctgggcagggcatcactgaaagaaaggcagcagccccagtcagaggcttatagatcaaactcatatctccctgggacagagcacctgggggaagsgggggctgtggatgcagcttcagcagacttaaacgtttctgcctgccggctctgaagagagcagcagatctcccagtacagcacttgagctctgataagggacagactgcctcttcaagtgggtccctgaaccctgtgtctcctgactgggagacacctcccagcaggggtcgacagacacctcatacaggagagctctggctggcatctggaaggtgcctctctgggatggagcttccaaaggaagaaataggcagcaatctttgctgttctggtgatacccaggaaaacagggtytacagtggacctcccgcaaactccagcagacctgcagcagaggggcctgactgttaaaaggaaaactaacaaacagaaatgaatagcatyaacaacaacaaaaaggacgtccacacaaaaaccccatctgaatgtcaccaacatcgaagaccaaaggtagataaatccacaaagatgaggaaaaaccagtgcaaaaaaggctgaaaattccaaaaatcagaatgcctattctcttccaaaggatcrcaacttgtcatcaccaagaaaacaaaactggacggagaatgagtttgacaaattgacataagaaggcttcagaaggtggataataacaaactcctccaagctaaaggagcatgttctaacccaatgcaaggaagctaaaaaccttgaaaaaaggttagaggaattgctaactagaataaccagtttagagaagaacataaatgacctgatggagccggaaaaaacagcacgagaacttcgtgaggcatacacattaatgggcgaatcggtcaagcggaagaaaggatgtcagaggttgaagatcaactcaatgaataaaagattagagaaaaaaaaatgaaaaggaacaaacaaagcctccaagaaatatgggactatgtgaaaagaccaaacctacatgtgattggtgtacctggaagtgatgcagggggcgaatggaaccaagttggaaaatgctcttcaggatattatccaggagaacttcaccaacctagcaagacaggtcaacatttgaattcagaaaatatagagaacaccacaaagatactcctcgagaaaagcaaccccaagacacataatcatcagattcaccaaagttgaaatgaagggraaaatgttaagggcagccagagagaaaggttgggttatgcacaaagggaagcccatcagattaacagcaggtctctgcagaaagctacaagccagaagagagtggggaccaatattcaacattcttaaaagaattttcaacccagaatttcatatccagccaaactaagcttcataagcgaagaagaaataaaatcctttacagacaagcaaatattgagagattttgtcaccaccaggcctcctgaagaaagcaataaatatgaaaaggaacaactggtaacagccgctgcaaaaacataccaaattgtaaagaccatagacactacgaagaaactccatcaacaaacgggcaaaataaccagctaacatcawaatgacaggatcaaattcacacataccaatattaaccttaaatgtaaacaggctaaatgccccaattaaaagacacagactgacaaattggataaagattcaagacccattggtgtgctgtattcaggagacccatttcacatgcaaagacacacataggctcaaaataaagggataggggaatatttatgaagcaaatggaaagcaaaaacaaagcagaggttgcaattctagtctctgataaaacagactttaaaccaacaaatatcaaaagccaaagcagggcattacataatggcaaagagatcaatgcaataaggagagctaactatcctaaatatatatgcacccaacataggagcaaccagatttatagagcaggttcttagggcctgcaaagagacttagactcccacacaataataatgggagactttaacaccccactatctatattagacagatcaacaagacaaaactaacaaggctattcaggacttgaactcagctctgggtcaagcggacctaatagacatctacagaactctccaccccaagtcaacagaatatacattcttctcagcaccacatagcacttattctaaaactgaccacataattggaaataaaacactccttagcaaatgcaaaagaacagaaatcataacaaacagcctctcagaccacaatgcaatcaacttagaactcaggattaagaaactcactcaacrgctgggcacagtggctcatgcctgtaatcccagcactttgggaagccgaggcgagtggatcacgaggtcaggagttcaagaccagtcaggccaagatrgtgaaaccccatctctactaaaaatacaaaaatttgccaggcatggtgtccagctcctgtaatctcagctactcaggaggctgaggcaggagaattgcttaaacccgggaggcagaagttgcagtgagctgagatcatgccactgcactccagcttgggtgacagagcaagactccatctcaaaaaataaaaaagaaaaaaagaaactcactcaaaatgatacaactacctggaaactgcacaacctgctccttgaatgactactgggtaaataacaaaattaaggcagaaataaataagttctttgaaaccaatgagaacaaagacacaatgtaccagaatctctgggacacaggtaaagcagtgtttccagggaaatttataccactaaatgcccaccaaagaaagtgagaaagatctaaaattgacaccctaacatcacaattaaaacaattagagaagcaagagcaaacaaattcaaaagctagcagaaaacaagaaataactaaaatgagagcagaagtgaagaagatagagacatgaaaagcacttcaaaaaatcaatgaatacaggagcttgttttttgaaaagattaacaaaatagaccgctaaccagactactaaagaagaaaagagagaagcatcaaatagacagagtaaaaaatgctaaaggggatatcatcactgatcccacagaaatacagactaccatcagagcatactataaacacctctacgcaagtaaagtagaaaatctagacaaaatggataaattcctggacacatacaccctcccaagactaaaccaggaagaagttgawtccttgaatagaccaataacaagttctgaaattgaggcagtaattaataacctaccaacaagaaaagcccaggactggatggattcacaaccaaattctaccagaggtacaaagaggaactggtaccattccttctgaaactattccaaacmatagaaaaagagggcatcctccctaattcattttatgaggctagcatcatcctgatatcaaaacctggcagagacacaacaaaaaaaaatttcaggccaatatccctgatgaacattgatgcaaaaatcctcaataaaatcyggacaaactgaatccagcagcacatcaaaaagctcatccaccacgatcaagtcagctccatccctgggatgcaaggctggttcaacatacgcaaatcaataaacgtatcccatcacataaacagaaccaatgacwaaagctacatgattatcccaatagatgcagaaaatgccttcaataaaattcaacagcccttcatgctaaaaactttcaataaattaggtgttaatggaacctatctcaaaataataagagctattaatgacaaacccacagccaatatcacactgaatgggcaaaagatggaagcattccctttgaaaactggcacaagatgaggatgccctctctcaccattcctattcaacatagtgttggaagttctggccagggcaatcaggcaagagaaaaaaataaagggtattcaaataggaagagaggaagtcgaattgtctctgtttgcagataacatgattatatatttagaaaaccccatcatcccagcccaaaatctccttaagctgataagtctcagaatacaaaatcaatgtgcaaaaatcacaagtatttctacacaccaataatagacaaacagagagccaaagcatgagtgaactcccattcacaactgctacaaagagaataaaatacctaggaatacaatttacaaaggatgtggaggacctcttcaaggtgaactataaaccactgctcaaggaaataagagaggatacaaacaaacggaaaaacattccattctcatggataggaagaatcaagatcttgaaaatgtccatactgcccaaagtaatttatagattaaatgctatccccataaagctactgttgactttcttcacagaattagaaaaaaacactttaaatttcatatgggaccaaaaaagagcctgtatggctaagataattctaagcaaaaagaacaaagctggaagcatcatgctacctgacttcaaactatactacaagcctacagtaacaaaaacaggatggtactggtaccagaacagatacatagaccaatggaacagaacagaggcctcagaaataatgccacacatctacaatcatctgatctttgacaaacttgacaaaagcaagcaatgggaaaatgattccctatttaataaatgctgttgggaaaactggctagccatatgcagaagactgaaactggacccctttttataccttatacaaaaattaactcacgatggattaaagacttaaatgtaagaactaaaaccttaaaaaccctagaagaaaacctaggcaataccattcaggacataggcatgggcaaagacttcgtgactaattcacccaaagcaatcgcaacaaaagccaaaattgacaaatgggatctaattaaactaaggagcttctgcacagcaaaagaaactatcatcagagtgaacaggcaacctatagaatgggaaaaaattttggcaatctatccatctaacaaaggactaatatcaagaatctacaagaaacttaaacaaatttacaaggaaaaaacaaacaaccccatcaaaaagtgggcaaaggatgtgaacagacacttctgaaaaggagacatttatgcggccaacaaacatatgaaaaaaagctcatcatcactggtcattagagaaatgcaaatcaaaaccacaatgagataccatctcacaccagttagaatgacgatcattaaaaagtcagraaacaacagatgctgcagaggatgtggagaaataggaacacttttacactaytggtgggagtgtaaatcagttcaaccattgtggaagacagtttggcgattcctcaaggatctagaatcagaaataccatttttcccagcaatcccattactgggtatatacccaaaggattataaattattctactataaagacatgtgcacaggtatatttattgtggcaatgttcacaatagcaaagacttggaaccaactcaaatgcccatcaatgatagactggataaataaaatgtagcacatatataccatggaatactatgcagccataacaaaggatgagttcatgtcctttgcagggtcatggatgaagctagaaaccatcattcttagcaaactaacacaagaacagaaaaccaaacaccgcatgttctcactcataagtaggagatgaacaatgagaacacatggacacagggaggggaacatcacacactggggcytgtcatggggtgggggattaggggaggaatagcattagcagaaatacctattgtagatgactggttgatgggtgcagcaaaccaccatggcacagttatacctatgtaacaaacctgcacgttctgcacatgtatcccagaacttaaagtataataaaaatataaataaataataaaaagggaaaaaaaggatgagttcatgtcatttgctgggacatggatgaagctggaagccatcattctcagcaaactaacacaggaacagcaacccaaacaccacatgttctcactcataagtgggagttgaacaatgagaacacatggaggggaacatcacacacctgtcgcacagtaggggagggataggggaggtataacattaggggaaatagctaatatagatgatgtgttgatgaatgcagcaaaccaccatggcacatgtatacctgtgtaacacacctacatgttctgcacatgtatcctcgaacttaaagtataaaatttaaaaagatgtcacaaagggaaatggccagaaatttatttttgttgattgatgacataatgtagaagcctattttaaacaggttaaagtctacatagtaagaaaggtgtgagtaatgaaatgctggtgaaagagcaaaatgaagacatctatcattgtgcttcttgccaactcttatcacccgcaggagcagagatcacatcataagaacacagawtcaaatgcatttcccatgacacaaaaaaagtcaaatcaaatcctttcaatttatcatcccagatctgtttgtggatattttagtcaactcagacttccataatgaaatatcatggactggatgtcttaaacaatagaaatatatttctcacggttctcatgaccaagaaatgccagatcaaggtgcttgcagattttattcctgacaagggctctcctcctggtttggagtttgttgccttcttgctatattctcacatggcagaaagagagatcatctctcttgagtctcttcttacaagaccagtaattccattcatgaggactccaccctcatgacctaattacctcccagagacccatgtccaaatatcatcacattggggattagagcccgaacatacaagttttgcatggacacaaacattcagcccatagcaatggagattttaataaaactttaagtgtatctccagagagatcttagatattaggtaacattatttctcacaattgagtgaattatgagtagacacacgcaggtaccctccccaggtgagagaaaagagggtgcttctctgaaatctggcataactcaccaacagacaggttttattttaagaaagtaataaaactaatatgattccaactttcagagctgtttatcacttggagtttcggttttagtaatttcaccgtagtaaattagctgactgagagtccagagattatatctgcatccagacagtccatttatcatgcttagcatttggatttcaacagagctttcctgcatatttgccaaaaggccactgaagaaatcacaaaaagctccctgttttgttcacttaatgccttaaatatcatcagtggctctggatttaggtttattggaatattttaataattcaacaatctgtttatctgaaagttcccaccactttctcagtttagaaatatttattttcattttgtaccaaaaaaggggtaggttttgatagttcaatgtgtacttacccaaggtagcaatgcaaaatggtggtagaaattgtcagagcgtaataatgtaactgtggcaaaggttttttactgtattttattattattattattattttgagacagagtctcactctgtcacccagrctggaatgcagtggcatgatctyggctcactgctatctctgcctcccaagttcaagagattcttgggcctcagccacctgagtagctggaattacaggcgtgtactactacacccagctaattgagaggttttaaatattaataaacagcaagttgtatggtcaatgtaacattcaaattatatgttcaccaatacctttatactcccagtatcattttgcaaattgacaagctattcaattagattactcaattttggaaaagcataatttaaatttyaagtggtaaaaataccaaaacatcattattgtaaccaaaaaaatccaattgcataaaatgcagacttgcattattggaaagtgaataaaatttctgggtcaaaactgcacacctagttgtctgggagttctatacggggatgagggatctaaatctgttccaatgccagctgcagtttggcaccaattggtgacttagtcagtttgtactacttggttcccaagtgtatcgkgtctgactaggcagtaattccagaaattctagttaactggtgctcttttagtctcatatatcaagaactactgggcctgaataaaatgggtacagggatccactctttgtctccctaggttgggacatagtgctgcctgccctttctgttccaatttctcttctttaaaaaaaaaaaaatgactattgaaatgatctacgcaaatgctatgtattttcttaagttaagcttaattttggattttctttttttcactttctattctttggggaatacttggacataatgaaattgtacttcctccacagacacttcttggtctccacctgctatrgcctctacctccctgtcagaagctccacctttctttatggcatcaagcatcttctctctgactgatcaagkcaccacagatacaatggccactgaccagacaatgctagtaccagggctcaccatccccaccagtgattattctgcaatcagccaactggctctgggaatttcacatccacctgcatcttcagatgacagccgatcaagtgcaggtggcgaagatatggtcagasacctagatgaaatggatctgtctgacactcctgccccatctgaggtaccagagctcagcgaatatgtttctgtcccagatcatttcttggaggataccactcctgtctcagctttacagtatatcaccactagttctatgaccattgcccccargggccgagagctggtagtgttcttcagtctgcgtgttgctaacatggccttctccaacgacctgttcaacaagagctctctggagtaccgagctctggagcaacaattcacacagctggtgagtgrgcactgctcacaattcccaattctttgtctcttctttctttgttgttattttataatataattattggctgtcttgagcaattagtgtwagtagaaacaaaccgccaagccagctgttgctgaagacattcaactagaattttgagatgaattcagatccaactggggaagtgagttctgtgatagacaaatgggaagacaccgccacccaatctgtaagaacaaatttgttcttaaactcttttcattataattctccctaacttagtgaatccaggaataatacataacactcaagcactgaacatggaatctaaaaatagagtgaacattttctaaattatatcaatctcatgaaagggtacaaagttagaatggtccagcacagatgaggctgagagttcaggagtaagggttcctttcttagttccccttaagttcttgtaaacctaaaaaatgactaagtggtttatcattcctggtccctaacaaagaaagtgaaaagataattattatgacatatatctttgataataagatactcccaaactcacgtttattttgtttctacatatacaataagaaatacatatacaataagaaatgttgaactatgtaatacctctatacattcatggttaattaaaataaattgtacatatcacacagatggcagaatgtctgacaataaataaaaaattttatacttcatataagttaaattattacacaaattaaaatccacatgaaacccaatttctcaagtgaacatttgctttaaagtaagactttatctgggctatctccccaccccayaccatttataatgaggtgagtagatattgggagagtctcagggaacagagtccctgtgaacctgttacagaaaaggggtcctagtccagaccccaagagagggttcttggatctcacgtaagaaagaattcagggcaagtccacagtgcaaagtgaaagcaagtttattaagaaagtaaaggaataaaagaatggctactccatagacagagcagccccgagggctgctggttgcccatttttatggttatttcttgatgctatgctaaacaaagggtggattattcatgcctcccctttttagaccatatagggtaacttcctgacattgccatggcatttgtaaactgtcatggtgccgatgggaatgtagtagtgaggacgaccagaggtcactctcatggccatcttggttttggtaggatttagccagcttcttcactgcaacttcttttatcagtaaggtctttatgacctgtgtcttgtgccgacttcctttctcatcctgtgacttaactgtctgggaatgcagcccagtaggtttcagcctcattttacccagctcctattcaagatggagttgtgctggttcacctgcctctgacaaactaaccatggcatgttaattagggttcatgctaagctgccataatgaagaggtaagaatatagtgactttcattcagtacaagtttatttctctttcacttgatgggtaggacagcttagctctatgatgccattcagggacccacacttcttccatcctatagctctgccaataccaagggcatttcctcattcacatggtcaaagctgggtcattggtacatccctgtttccacttgtgagaagcagagaggaagctgagggaaagcaattttctcctaagcaaaagacaccaaagttgcccacatcatattagtgggaactagtcacatggccatccttgccacaagggaggctggaaaatgtgctttctagatcagcagcctctttctatgagaaataggaaaatggatttgggagaagcagcacctagctatctgcacagtaggtgaagacagggaatctctaccccaggccaaagcaatgctaagacaccaagaatgaggctagtcaagtaagttctgtcctcatcaggggacagtaacttgaaaagggaagtaccacgatttgtttaaaatttcattttactcacacaaaaaccttgtgagggaagtaacaraatgtgggactgggtcagagtcaaaattgtggtggggtggggacaggggcaaataaaaaggaggtgtgggtcacacctaggaggtcggcgcttgcatctctatgctttctgggttcacagtacaattcatgaatgaggaggctcactttcagagccaaggacaaggtgaacatcactgagtttcaaacatttctgaaaaatgatctctaggatggcgtggctcacaggaggcagatgtgggaacctgaaacacaatgccatggggcatactgttgagattatgatagtttggaaacggctcgctgggagccactttttgttcttcctcacaattcagataagggccctgaggtacaacacagtggttacagggcttgataaaggtcacatggctagttagggacagttctaggactggcacccaagtctcctaactgccagtttcctgctgtttccactacaccacatttgtgttggccgggaaatatttactgcgtagagagacatgctgatgtttaagttgttgtttrttttaataggtcatttcaaattggctgcatccaaatagatgtcccatttacatagacacaggtcagtctgctcctgggctcagtttggaacatatttttatttacttgggttttttttttttaataactgaacttggcattcctgctttgctaatagcattggctcaggtttttaaaaatcatctgttctcacaattcaccatgaaaaaaatcacagccatccatctcaatacacagatagaaaggtggaaatatgggactaatcactgcaaatcaaccattaagtagtggcattctggtctcacattaaatccaaaaacaaaaatcaaaataataaaaaggaactaaaatatatgtctcggttaatgaaaagtgagtgtaagtggaattagcagcagctgagcacttagaacacagttaagaggaaaccatcttttattttgcagctggttccatatctacgatccaatcttacaggatttaagcaacttgaaatacttaacttcagaaacgggagtgtgattgtgaatagcaaaatgaagtttgctaagtcagtgccgtataacctcaccaaggctgtgcacggggtcttggaggattttcgttctgctgcagcccaacaactccatctggaaatagacagctactctctcaacattgaaccaggtaaaagaatccaacccagaaagtggtagagatgttttgttcatttttttaatttcgttctgtttttaagcacacgtttcaatctttaggccacaaaaatcaaactgaaatgataccagatgaaataaccttttggaagctatggagcacatcattagaaaggtagagtccaaagacatgcaagttaacattttcctgtatcaaaaagcaatgaacaagcacacctcttgttgcacaatctgagagctttaattttaagtttaatcagaacaaaacttttgctgtgtttargagttttttttaatgtagcccacagccaagctaatttacattctgctagaagtcaaaagcactttctcagtgctctgcaacaacctcggggcttcctacctaagcaatctttcaatcacagttcattatcagaatagctacttcatcatgtaattcaggatcagagacagcattctaaggaaagaaaaataatcattagataaaaattcaaacttggagaaagtcacttcgccatcaacaaaaaaaaagaagaaaataaatttgctttttggttgtatactacagatcagcttccatgtgaagattaaagcaaagagttagacaaggagaaaacttttaaagacatgggagcttagcccaaagccacacaagagaaagcaaacatttgctctgataataaagcaaagagtgtgcaccattgtaaccagctgtgaccaaattgggaactgtttttaccattagtttcaaaattctgttttctaaccaattgaaagaagtcctttattccctggggtaaaagtcagggagggctcctgatttctgccaaagctacctcccagtcaaattcaaaacaaagcttcctaattggctatgaattagtggagtgaatctttaacaccctctctggctctctgtggactaacaacgaaagcagaaggaagaggccatgggcaaaatgcaaaccaaaaaggctcagtgggagacatttatatttgatagagcagtgctttgagcaactttaagcaaattgcctccgtaccttagtaaacaggatccttaaaaagacagaccgcctgtaggcattgagcctgggagcacttacttctaaacaggagcagctgagtaagccctgtggctcccctaagaaatcaaacacctcctaaatgccagtaagacactgcctcttccccggaaaactacttcagaactgaaaaggaaccaggggtctttgccagttaggatcagarggctaatttcttcagccaattgattaagctagcaggacttggaaagcattgaagaagtcatagcacaatcccctgtcttccttcctccctcagggagctgacagcttacttagggacccatccaccagcacaagaaggtcaacgtgaggagccaagttgaggcaagggataamccaggtgtgcggctgtagggagcagcttctcaatgtagatgccacttaagtagtgtcttagaaagagggtgggaagctgtgagtgcactgccagggctgtataagggacactgttgatattggaagcaagcacagcatagtaatggtcttggggatccccagccctaaatgttgaatcttgtgtggtaactgcagcactcaatttctgcaaatggaaaatggagaaattttggccgggtgtggtggctcacacccataatcccagcactttgggaggccaaggcaggtggatcacttgaggtcaggagttcgaaatcagcctggccaaaatggcaaaaccctgtctctactaaaaatacaaaaataagcctggcatggtggtgggcacctgtaatcccagctattcgggaggctgatgcaggagaatcgcttgaacccggaaggcagaggttgcagtgagataaaattgcccccactgcactccagcctgggcaacagagagactcctctcaaaaaaaaaaaagaaaaaaaaaaaagagaagaaaagaaaatggagatggtaacattatgagaactaactgaaagaatatttacaatacttaatatagcacttgacaaattctagttacttaataaacattagtagttactattgcaacattgtcataattaacttgactatcaatttgtgacctgcttaaggtaccagcaaaaacagtaaaaagtagcgtgacaaggtatttgtggagggggtggaactgaaattattttcactgatttcttgtgaatagttctgctatgcagcttttcttccaagaagccaaaggtggtaagcatgagatggtgctaacgtcagtttcactcccagcagagtcacatttatgctgagctacctaagaatacctccagcctactcagtgaactatggcatacatgcccaattcttatttttagtggtggaaaagtaggggaaagccagtgcctgctggacaacctgggaaattacttgcttgctttccagaggtagttcaaccctgagcctgcaccaactcaaatacttttgaagaaattaacatgtaaagccaggagaagcagtgaatctgaatgaaarctgttgaatgttgaatgactacacatggtaactacaagggagatactttgcaaaagccactgaatgttacactaagcacttcggtgaacttatagttcatactctattccttaccagatacctggagagtgacaaaatctaaattttatatacattgaaaactcataaaataataactctatgcaagagggctgccaaaaactggctatgttgcaccagttaggacatagtgatgcttgtcttaagtgatgcttagaacatcattaagcatcaaccaaatgatgatggttcaatcaaagtgtttgaggacagcagaattagtaagtcaaatatggattttataagttaaaaataatcaatgaactgtatggattcatctatgtaaatccaaatgggtaaatccaatatccagcatggttcctaattatactacgctatgcatagctagaagccactgtgctaaaccgccctcaaaggttttccttccagtcaacagtgaggggaaggaggaaggtaccagcaggcagggaggagcaggcaaggaatagaggggggcacagggaatagtcactgactctgtgggctccttcatgcacagctggggattctggtttagatatttcaccaaaggcraaggctgggttcacccatgtaatcaggaagtgggcactggactgatgatcaggacattgaccatcttctacatgcttaatccaaaacagcattcatccaccaccatataacatgctaatgcatgaaaatccatccctgcccaaaggaatttgcactgtagtagaaaagggacatcttagaactatgctgggatcaaaactacatctttttcattccaaaagactttttaaggacaagtttctgttgtgccagacttcctacaaattcctgtgggcttgggcatcactaagggatggtcccataatgaagagggcactgagttttctttaagtctcatttgtcaagcctgaacagaagagagaatgtaggagtagaaataaatgaaaagaactctagtccctccaggctggtcaatgagacagcctttggccggggatagccagaactaagcagccagctgcagccactaaggtccagggctggggagatggaataccagctgtctttttctgtttgtattgctataaaggaatacctgaggctggataatttgtaaagaaaagagttggctcatctttccgcaggcaccagcatctgcttctggtgagggcctgaggctgtttccactcatggcaaaaggcaaaggggagccagcatgtgcagaaatcacacagtaagagaggaagcagaggagagggtgatgccaggctctttttaacaacccagtgctggtgggagctcacagagtaagaactcayccctccctcccagggaggacattaatctactcatatcatgagggatctgcccctacgacacaaacacctcccattaggcccacacttccagcattggagatcagatttttaatatgagattcagaggggaccactaaccatgcagggcacacagcagtacgagctaccattggrgggtgaggctgctgaagaggaggagatagcgaccccaaagcacgtggtagtcaggtgcacaaacacagattcacaaacaccaccctcactcacacctcctttttccattcaaacccttgttccaatccagggaggagacagtactaaaacccaaaaattctcaccaccattgcttttgaatagagttaattaacttcttaattctatgaatctgcgtatcttataaaactttgtgaacatgaaatttaaaatactgttctaaaaaaaagcctgtacagttacagaaaactgtttctagcatcagtactcctatacaattttagtctgaggaaatacatacaaaattattataagagaaatgcatatctaaattttaaaacacattaacggaaaatgtgcagatgattttcaatcattttcttcctcttttttaaatctagcaatatgacagctattttgctcctagtttttcagtgcrattggctgatccaaattttctccttttggtgggatatttgcgtgtaagccatcatggtgactgacgggtgagctgattaaaatgtccctagtacaaccaaccagtgcaaccagcagatcgtgctgtctctcrggaccctggatccggagtgaagataattacttcagattcctagaaaasaaggactcaaattccaatttacacagctcttggctctattgctggtgtggacttttcagttacagaaggcttgggctgatacacaacagtgcccatcctccagcatgtagtaagcgagacccaagagaaaatgatgctcaaaatccctgatgataacagaaggtcacttaagcaaatacaggaacggccctgattcaggttttgatctttcaagtatttacttgaactcaatgatgatgatccaatctgctgagaaaattctccttgaaagagaattaaaagggagaaatctttgacaagaaaaaaaggcagctgctggaaattctgtatatcaagaataaatacttagctttgtctctaggagagaatctcaagaatctatccttggaaaatagagaaggcatcctatcatttcaatgttttcccagccaggatagtcaactatagcaaaactgcattactggatttcttaccctttcacccttccctgaccaccttcgtagtagacatagtttagaggtagtggtccgcaacactgaagggtaagaaggtcctcccacctcasgtccagtgtccccccagcctccagaaacaccagccctacccaytcctgcctcccctaacccttatcaaagaatcaccctcaaaatgtaaaaaccataattgtcataaaggagatactgagcacatgtcaaagtcctatttaattttgaaataagggaattggtaggatgacaaagctggtttaaagagaatatgaaaaattggaattttaggtagccagaggacaagagagaatgatgaaatgakattggtaaatgtaaaacagaaactacaatcattgcatcatcaattttctctacactaatttctaattttatagagttgtaaaacgtctggaccataatccatagtaaatagtgagtcaaacaaagttattgctttccatgcatcagcaaactttttctttaaaagccaaacagtaaatattttaggcattgaaagccaaaaggcaaaaattatgtaggtacttacataactaattaaaagttaaccatttaaaaatttaaaaagcattcttagcttgcctgttgtacaaaagcaggcagctggtcagattgacccacaggtggtctctgtttactggatgggattgttatattctaatataacattgaaggtcacacagtcaacttttctccttatttccaaatattggatcatttttcttaaaccatcaacaattactcaagcctgttcctctccctggcctttatctttgctgttacagaaaagttagataagtaaatgataatgtaatcatgatttgggtacctgttcactcatacatgcagtgaacatttatggattatctgccatgagtcagacactatgatagccacaaggaccaaaagatgaatcgaccccatctctgcccccaaggagctaaataactaatgagaaaaatggaagcatatacaaaaagacataatagagtctgttaaatactggaatcaggatgtcagcagaaagaaatcttatgaagtaatgaggagagagcaattaattctacagaggtgamgggatatcatagcaggcatatacagacagtgatattgagctgggtcttggtgtatgatggtggtgggcccaggaagagaaagggggtgagggactattccagaagatgcaagaggaaaatgcagacatttctgggagtgccaggtttcttcagttactccacagtgatgacagctttatttacagaacagggagtgaagggagcgaagatagctcagatyggaaggaagggaaagccaggctgagccggttcacttaaagccaggctgtctaaaaatgcccgtcaaatctatttgcttccacttttggtgtcttgtttttctttttcttttgtttcctatgacttatggtcttttaaaattaaactttaataaaattttggaaagctcaaaacgttttccaactaagtgctagacagtccttaaagtgttctcaagtaaaataaaaataaaacagtttatcattcatacratactgcaagtttggaaaaacttaggaaaaatataaaataggtacaaagggtggtgcgtatattaatttgtttttaattttaaatgcaataaataaggcaaaaattaataaaatccattaaatatttttaaaagactccaaaaatatttgaragaaaaccagttctaaggaaatagacaagatagattgactctagcctatgaagtaggtgtctggaggccaagggaaagccagggctgaaagtatacatttgggaaacttcaactgaagccagagaacagattttttaaaatggccaggrgcaatgtgtaggatgggaggaagagctgtgaatggaactctgaataaccccaacagttaatggggaaatagaaaaattacagtaaagggagccaagaaatagcagtcagtgaggtgagagacaatgttgcagaaagtcacaaaacagaagagcagaagagggagcttctttagcagctgtgagtgaaaagagtagagggcacttaagtggacagttcaaaggtcatcagaatgctttacaaaagcaaatggaatagcaagggcagagaggccagacttcagtgaggctagaatgaaatggaaacggacaacgtcagcacaggctgtctacctcttgtcttacaacttagagcaaggcgccctccaatgttaggctcctacctttccacagagacagggagaaagttgctaagttccttgaggtttacattttaaagggatggcgcccaggacctggagcataacattccagagttgtaaaggtggcaagagggtttttaaaaggtttacatctcaaaggaacatagaatttgcaattacaagttcttttaactaactgctgtaagaaaaaggaggttgtcaaatgtccaacaatgatagactggattaagaaaatgtggcacatatacaccatggaatactatgcagccataaaaaaggatgatttcatgtcctttgtagggacatggatgaagctggaaaccatcattctcagcaaactattgcaaggacaaaaaaccaaacaccacatattctcactcataggtgggaattgaacagtgagaacacatggacacaggaaggggaacatcacacrccggggcctgttgtggggtggsggggagcagggagggatagcattaggagatatacctaatgttaaatgaagagttaatgggtgcagcacaccaacatggcacatgtatacatatgtaacaaacctgcacgttgtgcacatgtaccctaaaacttaaagtataatttwaaaaaaaagaaaagaaaagaaaaaggaagttgagagccttgtggaagaagtttgtcttaagtttagtgaaggctgggagcggtggctcacgcctgtaatcccagcactttgggaggctaaggcaggtggattgcttgagcccaggggttcaagaccagcctgggcaacatgatgaaacccctgtctctacacacacaaagcaaaagttagctgggtgtgatggcacacgcctgtagtcccagttactctcatcactgcactccagtctaggtgacagagtgagacactgtcttggggaaaaaaaaagtttagtgaagctgaggggaatattaaggctgtcttggtcagtatagtatttttttgttttgttttgttttgttttgttttgttttgttttgagatggagcctggcttgtcgtccaggctggagtgcaatggcgcgatcccagctcactgcaatctccgcctcccgggttccagtgattctcctgtctcagcctcctaagcagttgggatcacaggggtgcaccaccatgcctggctaatttttgtatttttagtggagacggggtttcaccatgttggccaggctggtctcaaactcatggcctcaagtgatccacctgccttggcctycaaaagtgctgggattacaggcatgagccaccacatctggcccagaatagtatttgctgtctgtgccccaattttattgtatttacaggcaatgcccagataatttatttagtatcatttgcaaaatttaaaacaaattccaattaagtctttctcttttcttttgcttaatgtcagggtagaaagcagtttgtggtcacaatactgggagagagataacattattccacaaccacttttgaactaaggagaagagagaatttgaaaactctcatgggatttttagttaatatcattccacattcagatcagcatgtgaactcctggatgcatcctctaaatgaggattagcaatccattaggccaaataacatctgcagaggtgcaggcatgtaggagaagcaatgtgctgttattactgcactaggtgtgccattccccttttgaaaaacccctggataaatgaatctgtgatataaaaagtataagccagtgttagaactttctgtgatttatcaactgaaaaaccgagtaagtcacagcttgctcagtattctgccagcatctccagcaactagagtcgtctttcatttaggctgctgtgaaaattcttcagaagcatgtagggcttttatgccagttagttgtgcaggctgaagatttcaaaaatgcaaaaccacatrtaacttattctctccttgaattcctaagaarcctcctcaaaaatggacagccctcaaggccggtaaatggtaaacactgaaattaattacagtctgacatccaggatgcatttacaaaaatgtggctcaacgagcttgttttccctggaaaaggcataatttgtaagaccttcgacatctctgaaaaagtggtatawgtcactcatcacaataatgayaataatagttactattaactaatgtcartaatagttactattgacacaaattttaatcttaataaatatgcaaggtagatattatttccccccactgtacagctgcagaaattgtgtttcagagaagaataagtaatttgtcttttgctggtcaaactattaccaaacgctgcagatggaattcaaagycagatttgtgtgccatcttcaactctaccctataacttctttacaaaaaggaatcttataagcccttctaactgggttatagaggctgtttatttagaaaaagtgacaacacacttcagttttattaatcctaaatgaattctgttagtttctacacttcgccaaatgaaatttcttatcatattttgtcatagtcttagaatgcaaaaaaaaaaaaagtgtttactctcagaaacaaaagtcctgagtgcccaagagtcccctttatatgcactgctaggagtgtcccttccagctggagcagtcataggaattctccttccaggtgattctcctcagcctctcccctcttcatttgccccatcatctcctacatccctggccctgtctcctggggtcatgctgctggccctttgcctcctgggacacgcagcactgcagattttctgtttgacatttgccttcactagaggccccaacactggttggactgccagacacacttcacctctctccagggtttcaatctgtgccctcattccacaccccaaccactgcatggagcttccttaaaaggctcctggagctgtttggccaacctgttaacacaaagccctccacacaagtccgggcttagcccagctgcagggcctcctcccagctcccccagtgtcagaattctccctccacccgctgatcctgggacaattggccaccaccstagtgccaatccatccagaacacctctgtttggcagataataataatggctgaaagctgagacaattcttcaacctcacatccagggcaagatgtgtgtgggtattcacacatccactcacacaaaaaaggattattgagagtcagctgtggtggtgcttcttgagagtggtggagaactgaaatgaaacctaaagtctatcacattacttgccactttaaaccagaaagaactcttgttaacttaattccacaaatgtgtattaagctccaaacatgtgcatggtgctgtgctatgtgctatttatcattgaatattctcactctaatctacctttcagcaataagccataagccaaacattttataacaataaaataagcgatcaacaaaaacttaaacatatatattttaagatttctttgaatcactgaactgcatcagcatttctggaggtatcatgagccacctccgttggctttatgccgtggaacacgcagaatgggagacgtatgtttgagttggagggacattagtgatcacttgatttaaacactccattctatggaagagaaaagtgagagccagagatgctaacctatgttcccaagaccacagacaatttctagaagccaggctttccccgctagggcactgtcctgaggcttcttcactgrtagaacagatgagcaggtccactctctctgaaggtacaaacatctcacaaccttctcaggacttggtggaagctgtgaggtccctgtgtaacatctcagatgaaccctcagtacagggacgtatttattcaaattactaaactcgaagccccaagcgctatgtaaaagtgatgttcacacattgagaagagaactgtcagactaccagggcctcattaagacttcctgggctctaggccctttgccttmatgactattagtaaagaatattaaaattataccttaacttcgtgagcacaaaaatgaatataatccagtacgggttgcattaattttttcttctgattttaaagaaaacatttttgtgggctcctaaaagcatggcgggcccccaggctgtgcctcctgcagattgctattgattgtgatgcgtaagtttgcctttctctgatgccccaggcaaaggaatgaccccttcacctcctcgccaccaacaaaaccatgaccacaaagccttggtggtaagtggggaaggggagggcgaggaggccccacagctgcccgcagcagccagcaggagcgagcgaacgtgcggcggggtcgaccccccagcgccgacgcaaccaaaaatctgtcactttgttcaggcgtgaagctttgtcacgctgggcgccagggcgtggcagcgcgggaagcgtttggattccagagtcttagctctgcctttttgaaatgggaaaagatgatccaggagttttcaccacattacccccgccaggcaggcccgatctgccgctgtaatcacggagtaataatggctctatcagcagtcccctggagctgctcctgctaccgcgtgaatcccttgcagacctcgcttccctccaccaacgcgcaaggcacagtggtttttaaagtcagaaatcagctggggtgcttaaaatgtcattcccgaagtctactcttgcttcttttgctattgagcgccatctagcgagaactaggtttcatcgcattggaaaaaacgtccacgaaagagagacccaacgggacctcagcccagccagcccaggtgaagcctgaattttataggcaagctgagctgaaaccttgcccttggacaggatccaatcaaaggagatgtatcactttctgtccaacacgtgagtaaaatgggacagcgcaaaagcaggagatgatatgataaatgttagggagataaggcactcagcacacagccagtaggacatgcggcaagagcaggacaaggttgagrggcgggacgggaaggggggtgtagcggagggcacgatcttgagttggagaaaaaggagtgagaccttctgaggtctggcagagagggaargcctattttcaggcctgacaaacatgagtgcacttgggaccagaaacaagaggcttgaaaaagaggcagtcttggaccaacagggacctatgatctccatgaatttataaactttttgatgaaaaggaccatgatctttttaactttgactgtaaaatgcctcaaggtgttccctgcaggcaggggacatcatttaaatgctttttgatcacacggtggagagctgggaaacaaacttcctcagtcaccaattgggattgcttttcagtacctttgaaatgcacacagaagacattatgtaagcaaatccagggaagaaactgatacatccgatgcccttacactggaaatctcagaatgatacaaatatttccaagccctacatggcagctcacttatttcaagacatgttcattgctgtcacatttaaacaacaggaaaaaacattggagccactgtagtgtcagactgtactttctacaagaaacattctgcctcatgaaagggtgcagcagacaatggatttgagcttttgtttagttaagggaacctttattcaaaggaaagcattcatggaagtctgatatgtctgccagtgaggatggcaatgaagatgtggtggggtgggggggctctcactctttttccctcatcccttatgagccccttggagtcctgtggtgtctcctggaaaccccatatttgaaaacctctagaattatttaaaaagccaaacattgtaaacagatatgaatgttaatcttggatcatacttactagctaaaatgggcttcygttttctcaccgatgaaaatgatgtcggcaatatccatatggatttgagaggtgctgtgaatattaytgaagacacatgttgaaagtgcctggcactgtgccaaacacataatggcctttgataagtgtgagctccctgtttatgtaaataactgccctttccactgaagctggaggttcagggtcatgatccccagggtcactccagggacagggcctgaaatgcaacgacatgtctcttctgaatacagccagaatctactgggaygctagtagactaggcccggacctctggccaggctggacctggatcttcccaccaactgctaacgagcagccactgacactgttcagcttgccgaggtcaagtgccctggactgtctctgtggagagactgtcaaatatgctgtgtagaagagctatcctcatggcttaagaatagaaagctaagtcattttgccagcaagcaattayagtaagcccagtgaatgccccaaaccatattatgtatttattaaatgtggtacaggatcatggtgaaatctctctatagtaccaacagtaaaaataaatggtttgaagggaattcaaacaaatccaggcagtgaaggcaattatagaccaatttgtctacacaccaatcatgaggatttcacttcctcagacccaaacacaatttgatcatgacttgaaaatattcttctagacaatggcatctacttttttctcctgaatctgctattgatctcaagtctctttgcccccttctttccaagctttcgaccacattcagaacaaaacattttcagttgttgcagcatagcatatagattattattgatcaaatcaatagcaaagagtaggaagttcaaactaatttgtcttgtacacgtgctctgggatgtattaagaaagagacaagagaccaggcgcggtggctcacgcctgtaatcccagcactttgggaggccgaggcaggcagatcacctgaggtcaggagttcgagaccagcctggccaacatggtgaaaccctgtttctactaaaaatacaaaaattagctgggcatggtgaagggcacctgtaggcccagctactcaagaggctgaggcaggagaatcgcttgaacctgggaggcggaggttacagtgagtygagatggcgccactgcactccagcctagggaataagagcgagactccatctcaaaaaaaaaaggaagaaacaaatattggtatggcctacccatgaataagttcattattctaaggaaaaatgtctttgggatatggcagataaagaaaatgataacaacatagggaaaattttgcttacaaaagttctactagttaaactttcattcatctatcatagagccaatcttttctatcccttccatggctctgtctccccagaatcagcccacatccatttttcagtctttgcctaaagcttaaagttttgggtgttccttgaaaaattacatgaaagtaaagagggtcatcaaaatacctagggaaaatatttttaaggtaataagagtggaagcagtgtgagttgctctacaaattactgttataaattctctcgttttgactctaattctaattgccttcacctgccgtattagcaaagmgggccaatatattagcaaagtggtccaatagctcccccttggggctctgcccttccctggaacttctcacacattscacgaagggatggccgtgagaccagtcagaggactgtatagcattatctgtacgcattttcccctaaatttcttggaagaatggctttactgttgcctgttccctagctctttgcacataatagttatttggttaaagaataatctgaaaagtaaatggctgatatggttgaacaggagaccttctggggcagaaacaacagtggtctgatgacaagaggcctgttctggttctgccatcagcccttgaggactccggtcagttgcttctctactgagagytcaatgtgctcagctctataaggataaggaagggcaaacaggggccactggccttccagagctaaatatctgagattctcttgatttctaatccacttcccaaagaattggagacaaccctatagaattaggaatggagtaaaatagaacaattaatgacaagaaagaagtgagtctaaatgttaatagggaagaaataattaatccaaaagaatgactctctaacattagggccttagcaagagaccaagagaaatttatatttaaaatcaggaaatcatcctgagttctcaaaactgttcacataaatgatgacttaatgctttataaatgcttacttaaaaaaaaaaaactaagtaacaaaacattcctaattctctaatgcagtggttttcaaaatgtgctccccagaccagatgcatcagcatcaccgggaactgctttagagccagaactcagtccccattccacgctgcttgcacaggaactctgagtgtggggctcaggaatctgttttaacaaggcctccagacgattckgatgcacactaaaggttgtaaataattacatttggagctaaactaatatcacttgtgtctgtaaattcatttttcaaagatrcagaatgtggttcttttccctccagtctgatatcacaactgtgcaacccactccaaaatgaggtaatagcaaatgtatttggtctcttgcctttgactgctgccagttccattgcttagctattcatacatgcrttaaaatctgccccatttcttacagctgatcaagcagatccctgcaagttcctggcctgcggcgaatttgcccaatgtgtaaagaacgaayggactgaggaagcggagtgtcrctgcaaaccaggatatgacagccaggggagcctggacggtctggaaccaggcctctgtggccctggcacaaaggaatgcgaggtcctccagggaaagggagctccatgcaggtgggtcaagcatgctaacgtcacagactcaagaactcattacttacacttctgagaaacccatcattagagtaaattcatatggtcctttcaacccatggtttttaaactttagtgagcgtagaaatcacccagaaaagggcctgttaaaacaacatggctgcaccctactatgccctgtttctgattcagtaggtctggatggggctcaggtagggctgatgctgctggtcctaggaccccactttgagaaccctgctctaggcttcccggcaagggttccttaagaccaatagggaaggaagaaagaacctgtatcagttttaaaagactgaatacttggtctactaccttaattggggatgtatttgtgcataaaatttgatttttcctgttagcaaacataatagctttcatcataagaaagctgggaaatatagaaaattacgagaaaaaaagataaaaatcctgttaattcaacacattatcttttggtgttcctgtttatataaaaatgaaaatcagttaattccacacattaacagttatcttttggtgttcatgtttatgtacaattgatttataaggaattttctaaagcacaatagaaacagactttctcgttttatagtcctctttttttaacttagaatgtttccccatgtcatgaaatatttttgtagcatcatttttagtgattacataacagtccattctctagatgtgttatgatgtgtttaatcattccttcatttccagacagaaagggtaagagaagcttttgagaaggaggaaaaggaggcaagatacaaaggcctctctattcaggaaccagactttagagtgttatgaaggtggccttatgagcagaaagggaccaggaaagtttctatataatgcaacctatattacagacaaaggatgaacatccacatgtattaataaagacaaacatcctaatttttttttcaaacacaaactcatacattcattaatgaggtaactaattttccacaagggtgccaagacaattgagtggagaaagaatagtctttttcaacaaatggtcctgtgtgtgacaaccagatatccacgtgaaaagaatgaatttggacccctaacaccacatacaaaaattaactcaaaatagatcaaaggcctaaatgtccagctaggattatgaaacccttttttttttaatttactttaattttattttatttcccgtttttcttttttttaattttattattattatactttaagttttarggtacatgtgcacaacatgcaggtttgttacatatgtatacatgtgccatgctggtgtgctgcacccattaactcatcatttagcattaggtatatctcctaatgctatccctcccccctccccccaccccacaacagtcccctgtgtgtgatgttccccttcctgtgtccatgtgttctcattgttcaattcccacctatgagaacatgcagtgtttggttttttgtccttgtgatagtttgctgagaatgacaaacatcctaatattaaaatgagcaaaaaatacagaggtgcaattcatagaagaaacccacatgaccagcaaaatacagaagatactggatctcactatcatcagggaaatccaaaaacaattaggagatatcatttgaatttggcaaaaggagattgatgatactcagtgtgggaatatggaggaaagctagwtccatcaagcattgctggtggatgtacaaattggaaaagccttttttcaaaagaaatttgtcattatctataaaattttaaatttgactcaggtactctacttttagacaattatttctacaagaatagttgtacctgtgcaccaagatatgcttacaaaaatgttcacagcattactgctttgagtcatgaaacaattgtatagcccatcaatagggaaayggttagagtacagtacattactgtgaaacatggcagctaaaggcaataatatatataactctactggagctgccatagacggaaaaataacatatcattaaatgagaaagcaaatygcagcataaaagatcccgtacatgtaataaattaataacaatactgtaagtatattaggttcaaccatatggcactgccattttgtcagtcacaaatcatcaaatattggcagttttgtatagttcgatctaacatgtaagtaaattcataataaaaatgtggaatagatacacaactatcactccagttaacaatggaatggagtgaaattgaggtccaggatttttaataatgagaatctgttcatgtatcacttgtgtacattttttttaggctagtcaagtacagtagtaagaagagggaaagaaatagcacaagcatttccatctgcaattgactgtaaacaatcagttgagagaattcactatgttcagaccagccaacatgtgtaatttaaaagaagggttgggctgggagtcgtaatcccagcacttcaggaggccgaggtgggcagatcacctgaggtcaggagttggagaccagcctggccaacatggtgaaaccctgtctctacaaaaacacaaaaattagccaggcatgatggcgcatgcctgtaatcccagctactctggaggctgaggcaggagaatcacttgaacccaggaggtggaggttgcagtgagccaagatcacgccattgcactccagcctgggcgacagagcaagactccatctcaaaaaaaaaaraaagaaagaaagaaaggttgaggggtgggaagaaagggccaatgaacaggctggattaaagtgaataagaagagggttgcatgcggcttttgtgaacaggaatgtattccgttttcattttaatcagccctatttgctatttcagatggctgtacaattcgtaattttaaacatttctctttctttagtgagaaagatcactttaattctaggttgtcgtaagtgagatcagtaaagcaaggcataaggtgatctggaaataaacacctctcaaaaaggttggtggtgctctacttcctccacctgtgcctgtctctggggcataacatggacttgagggattcaaatacattggaaaattgacgctccttagactaatggaatgaaatgaacatttttgagcaccatgtgccaggyaccctgctagatgctgggcaatagatgagaggaagtggggaaggaagaaagggagggagggagggagggagggaaagatgcttaatttcttcaggaagaagggagaaattcccttattaccccaattttgcccttttcaacttcctgaatattcctttttaaatgttaagtattaacccctgataccctcagcatgaggacaaacccgttgcccctatgagctacttcagacagactctcagtgaagaaacgggaccacagcagtgctctgagggtcccttgtgcatctccgtgacctgcttctcctcccatcagttatttctgttcatcccaagatgctatcatttatgtgatgaaatttatttatataaggattagctgacaaattaaaacccaatcaaccatagattagaccctggttacaattagaggttttaaagttagacccaaatttaagttaagagctctgccccctactaggtatgactttaagccagttccccaccccctgcccttaagcttcaaatttctcatctatctaatgggaataacaggaataaattcatggtttttggtaaggaataaattagatgcccctcagtgtaagctactcactactagcattattggagctgtttctgtcaacaaagggcagccctgtaaggaaaaactaagaatccctacctggcacttaaacctaaactcagaagcaaatccatgagaacaccaagtgctgcaactttgaaaacagcgttctctaaagaactgtaaatttagctgcgtttttgttattctacctgaaagtgatgagatagggaaatgatactgaaggcaggtgccctcctgagaagactaccattgacacacaaagagcagtttccattgcttcagttacttgtcattgtttctcattacattttcacctttatttttccttctattcttttcctccatccaatatttgtaactatactccatatatttttacatttccctcaattttagatgttgtatacatagattctgccatgctaggaacttacttcaaacttcctttttttggtgtaatcagttaggcttttattactcacaattatcagtatacatacacaaaaaatgcaaatctaaatctaacagagtagattctgacttttccttctcaggccttaacattctcacttttgtcctttaatttcataggcctactatgctgtgacattactcataataatgaaaattgtttctaaatataggggacagtttcagtaaatgatggtacacagtgacatttatgaggatgttttaatcatatcaaagtgcttgttgtaaccgcagcaaagtcacaggttcactcacatgctacacctcaaatggagaaaaggaggtctagtttttttccctctggatagttgttaccaactccctttggagctctttctccactgaatagtgggaaggttcggttacgggggaggtttgtaggaggaaggggttggaattttatatagtccaatttaatgtagttcaaacttccacctgattaataatttgagcaatcactttagacaactcagttcgcttggaacatatagtgaggtatggctctcctggtcttgacagttctcctggaagttttctagttccatattcccctcacctgtgatctcttagttctgatcccaggcatctgccccttccctggcattctcaaagcctccaaatctcccaaccaggacaaataggaaccgaaaatgctgccttagrtggtgggatggggaacaaggaacttgttactcaacttcctttaaacaaataaataaatacaggcctggcacagtggctcacgcctgtaatcccagcactytgggaagccgaggtgggtgatcacctgaggtcaggagttcgagaccatcctggccaacatggtgaaaccctgtctctactaaaaatacaaaaattaactgggcgtggtggcatgtgcctgtaatctcagctactccggaggctgaggcaggagaatcgcttgaacctgggagatggaggttgcagtgagccaagatcatgccactgcactccagcctgggtgacagagcgagactgtctcaaaacaaacaaacaaataaaaaacacagatagggtctcactgtgttgcccaggctggtctcgaactccttggctcaagcaatcctcccacctcagcctaccaaagtgctggtattataggtatgagccaccgcacctggcctcaacctccttaaactatatttttcctcctctctcctctgccttcttcccatgagcactaggactgaaattttctgtccttctccatttccctgaaattgtaataaattgatgttgagagaaagaaaaaagttgaataagggaatatatatatataggaagatagctcctaaatattatacccattttataatgcaaagaggaaaaacacaaaatgcaaaatgcatatacactatcaacagaaattatgtatatagaaaggtctaaaaatatttattttatttaaaaaaatttaactgacacacaattgtacatatttatggggtacaatgtgatatttcaatacatgtatacattgtgcaatgatcaaatcagggtaattagcattcccatcatctcaaacatttatcttttctttgtagtaaaaacattcaaaatcctctcttctagctattttgaaatatacaactacagtcatcctactgtgcaataggacaccagaacttatcccacctacctaattgtaactttgtacccactgaccaatctctctccatgataccctcctccctcccctccccagtctctggtaactactgttctattttgtatttctataagatcagctttttaaattccacgagtgagagcttgcagtatttgtctgtgtctggcttatttcacttaatataatgtcttccaggttcatccatgttgtggcaaataacaggatttcatcctttttatgacttaatagtattctattatatatattatatataattatatgatatattatatattatatattatatataattatattatatattatatattatatataattatttatatataatatataatatataatttattatatattatatataattaattatatataatatataatttattatatattatatataattaattatatataatatataattatattaattatatataatatataattatattaattatattatataattatattataatatataattatattaattatattatataattatattatattataatatataattatatttatattatataattatgttatattatataattatattaattatatattatatataattatatataattttttatatatgtaatacatatatatcacaatttatccattcatccactgatgaacaacaggttgactccaaatcttgagtattatgaatagtgctgcaatatacatgggagtgcagatatctctttgatatactgatttcattttctttggatagatatccagtagtgggattgctcgatcatatggtagtcctatttttaatttctttaggaacctacagatggttttccataatgactactaatttatattcccaccatcagggcataaaggttcccttttctccacatcctcgataacatttgttatcttttggctttttgataatagccattctaactggaataaggtgacagtttattgtggtttaaattttattaacaatatgccattacagagttgtttttcagcaaccacaactcagaacttgacttgagaaataaatctatgttttgtaatccttccatccttctgagaccactgcctaagaaatagtaagccaactaaaaggcaaaagtcaggggaaatgctgaaagcacacttcttccaactcaaacggaagacacctgcaaaaatatgctatctattttcacttgtcatgatgttaaaactaaaacagtagaaagatgtagttactattaatgttgataagcccaagaaacaagatactatgtttttgctttcttttgtaggttgccagatcactctgaaaatcaagcatacaaaactartgttaaaaagttccaaaatcaacaaaataacaaggtaaaatcatactttctaagttggttgcaattactaaacttgacttttgaaggaaattaaaaacatttatgtccctcttattttaaatagagataagcaagatactttttatttttaatttactgttttaagggggtgacattttctagtgcaaggatagagtcagaaggctgggattaaccaaaatgtgtagataaaacaacagaataacaaaawcaatccaagtattttataatatttccaatcttttcttataaaaatatacaggtaatttatcaaatgtattttaaggttgaaatctttacagtaataatttatattcctggcattgaataattttatatactttcaatttcaaataataatcagctaaaggaaaaatatgtagaaaatatgaagaaacatcatttgtgaacaatgagtaacttcaaaaattcgtaaaagttcatcttcagatgtttttcagtgtccaagacatctcttaaaatattcacttaatcaacttattttactaaaataattttattttacaaaggaaaataacttgtctataagcaatttatatatagttgacatagttttttaaaataactttgggggaaaaaaccttggacaatctttagcctaaaactacccattttcaaaaattatagtctttgatagaaacaattggtgataatcagccaatgtctactttatctaaagtctacagtgctggataaaaaaaaaatgcctcaaagtttgcacctacaaaagttatcatagttaatatatgataaggatactggggaaatcacaccaaatgctaataataattttatgtatccaagtgcacactgggaatgtgtgccactttggtttcctgaaacaaagaaaattggaaaaacagaaaaagtttagactagggccataaaatgacaataggacacaggatctgatattgacaaaatgtccaactaaatcccgaagtaccagatagaattatggatcacatttcaaataawtaaaaggaagtgataattttcacagtaggaagtaaacttgaagaactacatcttagttcaaggccagaacaagtatcaatgctgattattcctggctatgtggatttctgtgttgacagacattcagaggacacatgggttccctgaggaagcatgctataatacactaatggtgtctactatggttggatgggaaaatggtgactcattcacagactatctgccactcctgctctatgagatgggtcagcctgagaatctaaataggcttaagagrgcatggagtacatttctagtaggttataaagttaagaatattttgaggccatcttcaacatttcaaagaagatgtcataaatggcaagcacatcctcttatctaccagtggcagtaatattggaatgaaccattggtttgaccttgggtggcatttcttaagttcttaaaactatttctctttcaggtaatcagtaaaagaaattctgaattactgaccgtagaatatgaagaatttaaccatcaagattgggaaggaaattaaaaactgaaaatgtacaattatcatttaggctatctcaagagagatgatttgccttctcaaggaaaatggagacaggcatattcatgggtcatcaaaatccagacatacagtcaacactgagaatcagcacacaccatatttcaaatatagaagagtcatgtacttggcaaccagtaaattctgaagaaaaagacacttacttattattaaaaccccaaatgcaatcagcgaaacatatttttactattcttggatgatagtcaaaatgatcataagccaggtttgcttccaccttccctgaaaattttactcacagatcatttgcaacaagcatagcttacttattgtttagggactgaacaatttattgggaagcaaactctttatatgctagaaagtacatttaaaagatgactacttacgcagggagatgcaggtctctctaaacgcatgaatgtatgtagtgtgtaggcactgtagtgagtgtatatatgctccacactacgtctgataaacacaaacctcagtattcagttattaggcacactagttttatacgcaactactgcttacatagtagactgttttgttgccaataatctttgaattgttctttaaaagaaactgaggttcagatacacataccatggaaaaatcttacttttcttgttactacacaaagctattttaaagaagatgctatgttgggagaagggcgaagttgtactatatgacataatcaattcctgtcttccaccacagatgaacaatgtcttcctataataacttcagaatatttcctcacaccaactttagtgtgtgtatacctagactggcatcaatgtaatccaattcagtccattttttatgtgctgcttaatgaaaatgaatctgtctctatctctttcaaatgttctaatatcagatatatttgctacaaaccttaatttcaataaagtaaaagtgatatactcataggttttttaatgagcctttgttttagtagatagtctttagatttgttttatgtattcaataaatgattttaagcatgaaaattttaatgctgccaaaagacaacaaaatagtaaacacaaagagcaacatataacattaagcttcaaaaataaaaacaggctgggcacagtggctcacacctgtaatctcagcactttgggaggccaaggcaggtgggtcacttgaggtcacaagtttgagaccagcctgggcaacatggcaaaaccccgtctctactaaaaatacaaaaattagctgggtgtggcagcacgtgactgcagtcccagttactcaggaggctgaggcaggagaatcgcttgaacccaggaggtggaggttgcagtaagccaagatcacgccactgcactccagcctgggcaacagagtgagactgtgtctcaaacacacacacacacatacacacacacacataaaaacaaaatgttcttaataatggagacaattttttgggaagtggtagtgccccatgagggttacaaaccctcacaaacacctagctttcatcaccattcccataccaatcctgtcttccaccacagatgaacaatgtcgtcctataataacttcaatgactacttcctcacactaactttggtgtgtgcataccaaagtgaagatctataatgtgagacaaggacttcaaggtgaaatatgatgacaaggtgccacagaacaaagaatggtggcaagaggttacctacccacttccatatccctggaacttcacaaaggaaaacaaatgatagaagcatgataggctgaccaaaagtacatgaaaacatttcatcaggagaaacaaggatctatcactatcactcctgtataatgtagtcctcaccccctacattccctatactacttgtgctctaactagtataggaaatgtagttttctatggagaaagagaaggaggtaaaagccctatattctgtggggagggtcccattttgtggtaagtgtctctcactccttggatcacccctcttttgggttggtcttttccaaccagccagggaagagctgatgaggtgagatggacagagtctccttccactctcagaggacccagcaggatcatggtaggttcttgacacagggaatggaccagctatattcaaggccttagggagaaggagccttcttttggtccccagtttttacatcctgtgtcttctcacagattagtaacggtctggagaaaggcagccaaaatttggtgtgtctctaatctctacaaaatgagtagctgtcactcacacagaatcctgcctgtttcctggatggagatcacataggaaatttggggcctatgtccaaagaagtttcaatcaccttgagttccttgcttcttcctgcagccacctaacacagtgcttccagccctagcgactggatcaagcttcaggagcccagaattcgccaacttattccatctgaaacacggcaataagtgcaacatttacaacctgttcatgacaccctgtaatggtattaaaagcacaagatgcaagtggaaattctacacagggagcatttatttatttgtatttccagtacatcaatttttagagaaagcattagatatacacttttaatgaaatgaggaaaaattaattgacagtttgactagatgaattttcataagtaaaaagaaaacacccaactaataagcctgtgatttaaaggtgagatgctacttggtacaaattaggattgaatgtgtagatatggacataaagagtggaataaccgacattggagactccagaaagtgggaggctgagaaaaggtttagggatgaaaaattacctactgggcacaatgtatgcttctctgggtgttaggtacactaaaagcccacattttaccactatgcaatatacccatgtaacaaaactgcacttgtaccccctaaatctatttttttttttgagatggaatttcgctcttgttgcccaggatggagtgcaatggcgccatctcggctccctgcaacctctgcctcccgcgttcaagtgattctcctgcctcagcctcccaagtagcagggattacaggcacccactaccacgcctggctaatgttttgtatttttagtggagacagggtttcaccatgttggccaggctggtctcgaagtcttgacctcgtgatccacccgcctcggcctcccaaagtgctgggattacaggcgtgagccaccgcgcccagccctaaatctatttttaaaaaaacaaatttgtactgaagattctccttttgaatgtgcattaatttttcctgatcatctcttgaaaaacttctgagacagctaagcttgtttcatatattaggttagcaatggggaaagaatacagtgatttgaattgaactaaagcgtactcagagaagtgctcccagcagagtaggtgctacttctgccagtctctccatcttacccttccatgaggcttatgtacagaatgcctatttactgctgaccttctccagtatggcagtgccattcctatgtgctaagaatgtatacaccgggcatatcttgatccaagttttaataaccatacgttctgatcctataaattacacattattcattctaaaatttcgtagagatctaggagtgctctgtgtcctaaaatgtatcagtgtttccaaactgggggtgcagaatctttaggggcacacaacctgtctcttccactgttgctcttctctttccttattgttacaactgtttccccccctctaacatgtccttattctcatgtttagatatcctttgccctccccttccatccttgttagtttatcttctgggagaaattttaaaactctcaatacttgttattattggtaatgataaatagggaaaacctgtcacaccttctgaagttgtggaatgacagagaggcaaccctttgtaaatccacaggtgccactaaaaagtgtttgttttggttctttttgttacatatgattgcagcaaaggctttgatatatttttcagtctacaactaaattacttgacctctctggatctgttacctcttccataaaaggaggcaggtctatcactaacatcatattaattggctgactgattgattcaataaatatttattctactgatccaagtactcttaagctacttcaggtaaaaaaaaaaccaatgatctacatatttggatcgctgagaaccatagtaatgacctgtgaatgaaaatgtcttttaaaaaatatccaattaataaagctctacaaacaataccattattcttgcctgtggattgctattctctaagtgttcacaaccaccactgattttccacttaagatgttctttccttggttgcttgcaaaacaaaatggttcacaagaatgacctatgaaaagtcattacagaagcagaatgagcataacaatagaatgcctttgtgtggccctgtgctcctacatgcactgttttgtttcttcctcatattttcacaatcctctgagaaggtgccatctccccaactttacaactaagaaaactcaatattctcttaacatacgtggattagagtaacttccttttctcaattagttcccataactcataatacatatctcaactgtgttaccacaattaggaattatattaaaattgaatcaaatgtgaaaacattctgtcctctcattttaaatattttatgcatgctgcctttgcaaagcatatgctatggaaagaactggtattaagaaaagattagttctttatatatagtggtttaaacttctaattttaaatctcagttaaaatgattaaaatatgagtgaatttacttttgatttccacagttttaacctggcatgcatgggcttgactgtgaacatggtaaagcagctgcatgaacatcatttaggacaccactcctgctgtttcctttaaaaggctgacagggtcctaagtttctccagcaaaggggtgtctgtgtgtatgtgcatctactgtacgtaggttactgtaaatctatctgaattagggcagttgccctgctggccaaaattaactcaggaaactattttaaatagataagttctaggacagctgtgtgacatgattagaaacattatggcttaagattaactataattgtattaactattagagtcaaaaactaaggacttataacaaccctttgctgtgatacatttcttacaaatttctgaaacattagattctctcatttaaatatgtttaactctttaattttccatctagtgcctattaatgtatctaaaagatacacaaaactattgtactaaagagacatgtcattaaaaaacaatttggctactaaattttgttcaagaactttactcactactggttaggaaaaaagcttatcattcactatcctacacaaataaaaacaccagttaaaggcgagagatggaagagagagaataggtcatttacttcagtagctacaccttctgtccccaatcacagggacgaaatgacccgagggtgggtgaagctatgcagtaatacagccttcaaaagataatcacatttgcattctcaatagcacagacacaaccatttaatttaacttgacaatcatttgaatgtatcataataaataaatatttctctactaagacatgagagaagcaattctgaagacagtgtctgtggctcacaaacactagtcagctgggaaatacttccctaactgaggtaatctttctagggaaaaaagaaatcactggaatttcatttcaaaggttagggtctctaaaaactgggggaaaaagcagtacagagaatcattttactttataattttattctaaaatacaacaaaactccttagaattatgtcagcataactccttgatgtatttttgtcyttaaattccaaatgtgaaagtcataaatattaggcttaaagctgctgacatttgaatcaatactaacagcacacaaagaaaacattttaaaattatcagttatgtaaaacaagcacttactaaatacaaggatttctgaattacaaagcttatgaaacaggtctacaattaccaaaacctcaaaggccaaaaaagacactaggaatttcttaaaaagaaagatgttggaagcagaacacttactaaatcaatgaaacaacttggacaagattctgatacaaaaatcactattgagatgaagttgaaagaatatttgaattcagtccagttaagccactatgccacctaaaacctatttccttttctaattgaaacaaaacttatctcaaaacttttaggcatttaaacaatctgaatttcctttatttttccacagaatataaaaagaatattctgacagcaacacacattgtgctagcaaagaaaagcaaatctgtgctggatactattagtacctcttatcacagaatacatcaaatacattaaggctctttctagaattctagaacttcgaagtgtttcattcaaactaagacactgcaaaggaggaaaaaaatagattttccacctttaatggaaatttccaaaaatgtctgaaaatgtctataaagtacacagcttttcagaccaaaacattagtgccttgatcattttaagtggtttagttattgtaagaatgtaagctcatgttttattactccagttatatggtactgtgccatccttaagaagtattttgaattttgaaaaaagttctcttttcctagagaacaattacgatggatgtaaggtagtcttctggcaaaggatgagaaacatcagaatatgcccatgtgtaatagttagagaataatgagagttttgggaattacagcgggatacagaaaaataatgtttaggtccaaaatttgctaccataattaaccttaaacaaattcaccaaaagccgtgattaataaaatctgttcactttatagaa

SEQ ID NO: 8791 - DNA, 219633 bp, Homo sapiens
  misc_feature (1)...(219633): n = A,T,C or G, or insertion/deletion polymorphism (see Tables 1-2)
ccaattacaagtaattaattcctgatttcctcctctgtgtcgggcactctcccaaacatggtgggatgctttaaaaagaagttatgtcctggcaagtgttggaaccaagacacaaatgacaatgtaactccaagccatgtggcagcaaccacaaccagcacctctcgagtgcttacttcatgtgcacatgctctccctagacatggcgactaccctcaccgtatgtattagagactccaagctcaaagagattacaatgctactgaatggcagagcaagaattgcaatttaggctggattttttaaaatccagatagtcaacaatatttcacattaccactctgactcgagaggggatcacgtggaaaaggggcaggctgcgaactgtttcaggagcttcagtggaatgcgtgctagccgagggaagacgagaggacactgcaggccggggagcaggagaagatgaaacagcttctgtggaatgcagagattatccttccttacagttaccaaagccgtatgtcgaggagtagcaaggaacgaggccagaaaaatttgacagatccgtaccacaaagggaatgcacagccaagccaaaaagagggggarccccagtgagatagtaggtggccatggcagatcctgaaccagcaagtctatgaccataacttagggaattgagggcaattagcctctcacagcctgaggaatgggctggagagcacgagagctgggaggaggggcagggccatgagggttcagtggtgatcctggcacaaggcaaagagagctggaagggagtcccagccgtgggaagggaaagctgcgggcgcctctgggaagcatccagaaagaagcaggagactttgtgactgagcagacgcagaggataaagaagaggaaaggctaaagcctcatagtctctgggctctgtacccagaaacatcagagggcaccaggaccaaaatggcagagtcgggaagggttgtcagtccaggtaaaaaatgagttcagtcctgaacatatttgctcagtttgagatcaaagcaagacagccaaggggaggcgtcgcgtggaaatgtgaagacgttgaactggagttcaagaaggagttctggagtccccttcagggagtaatggtgcatcatggagcagacccccagtggaagttagagagtgcaaagaacaaagagaaccacgcagagctgcccctgcagctcacccacactgaggggcatgggaagaggaagaagacagaagcagagacacggaaagagcgctaggagggacccatgtcccagagttaggaccaggagaacaatggagggaaacgaggctggaaccagctcactgtgtaccagactatcaaagtcttcaccccaaagtcattcctacagtgtcaaaagactcagaagaaattcaccattaaaacatgctctggttgacatcccttttcattgtatgcataagaatggtaggaatatgtcttttgtattgttctatagttgacattttttcatggttgcttaataatagcaggaagaacaatgctctaacaytattttaggcattctattgttgcttgagctgactctagcccaagaactcaaaataccaaacctccttgtgagacattttaatraggttaatccttcttcaatttggggaacaattattataacaaatatcatagaattcatcaaaaccactgttgtcatttagccacttcttgatgttcttccactgtctacaaaggtttgtcttagatcatcactggtgggttccatttgtctgcaaaatctttaccagctcttaactaaataactgaacttgttatgaccatccttgccagttctcagaaatttgccaacagccttgttaatgaataatgtagggttttgtgaattccctcatggcctggcccaagtaagggtaggttttctgggtcagttcctaaaggcactcctgactagaatcagtcatccatgccgcaactttccaaacatcccctgcctgcctacctgccacctccgagaaaagggacaggaccacatactggggcctcagttggagctgggagctcttttttaacactggtctcctaaaccctgcccttccaattctttccacccctctgagagcaaagttcagccaccaagattgttaatcacagaaacaatgacattttggtatctcaaaggagcaaacttgaaggtcatctttcagtgcaaagacccttagacttgagagcagacaggcagaatgaccatgtcttctgtgtatagtacaccatcacagtgcacatggaaatgacatgctggtgtatagttcctatttctccctcatatttcagaggyggaagcccctcccagaagtttcctctgagttccccaaagctggattcagtgttcctatagcccttcgattcccctgattgtgacatttaccagcctgacttggattcgtctgtttcttttccaatatttctcacctgaccttcctgaggacagagagtgggggtgagtccctgccgcatggccagcacctggcaaggtcatggcaggaaggaggtgttcccgatgtgtgtgtggaatgaaggaaggcacaaacgggtccgtgtgaggaagggacagacctgccagggaaactgaggtatagagtttgatgagtacccccaaatcatctgcttaaaagcaggtataaaatgtaaggtcctctggtgcctaaagcacactcatcctgtgtacacgtgactattaataatatatagcattgataattctgtgaatctagtcagagtacatgaacattgtgtcttctggttggtcttaaagttatgtcccttcaccctagtccaattccatctattaatataaagagcttgcagatataaggaatagcttcaccaatatcactcctgagatcctgggcgatgctgctcttgttgggactgattcagaaaccagccttctcttctaaactacatttccagtagaacatggtccatacttatatgggaatgaaatctcacttagtttgaactctaggtcattcagtcccagaggtggtgactaayggtcaggagatgacagtattgctggacaagcatcaccacactgaggggaaagttcacgtttctaatcctgagaaataatctgttaagaagcatcacacagaaccagctagaggggagtgtgaaagctgctgcaggaagggttcattccgcccagtgcaactgagtgactaagagtagagggtgctcacaatcagaacactgctggcacgtgtttgtctggagcctgcaagctattcctcctttcttgctgaagaaaagtggaggaagggaggagcggggagtagagtggtaggttcagcgtgggataaaatcaatggtttagaaaatccacccatgagtacgtaaacaatatgaccatagcagatacagcaaatacaaaattaaacagcctttcatgaagaaaaaacaataagggcaattcatgcctggcacacagcaggtgatgtctggatgtacaaatgcaggtgaagtgtgattcagacagtgcaaaggagaggtaagccaacagtcacttccactggcttctgaatgaggatctgatcaaatccacagcatcttatcattcaaaatgtgcttttaaattatgttttgcttggatcagtattgaagctatttcagtgttatggtacatytaacagctgattttggaaggaggtaagccaaaatgttattgatggcatgaaaagtgagacaaattttaaaattaggcagattcagtttttaagtgattttcttgtatacccatacatcatctgcacattaagcacttttctctaattaagccagggaaaatacagagtaatgataatatctgtgaggtcagctgtgatcagaagtgcccacaggctgcatctcttaaaaacagtccatggcacctcaagggacactgcaaagacagtggccgggaatgtaattgagctttaggaaatgattaaagggaagtaaaatcatctccaaatcaacattaatgcgtttgatttcccgggtgagaacaggatttgcgtaactgagtggttctttctttctacagtcctggatgtttggaaagccagctcttacagttagctttctttgctttgctaacattatccatcagaaaatcgaaatgcaaacagctcctatttcccaatgaagaactttctctgatttaccttaccatcatcaggcttcaccatctcaccttggaagcgttcaatcttttggtcaatatttctagaccaaaataaagtgctctcaagcctgttctttggaaagtattttgtcatcattaccaaagagtgtttaaataactggctatgaagtttggggagactgggctgggaggtacaatctgaagttaattgctgatgtaatcattagtcctttcaatacccagtggagaagctgcctccagggagataagctctcaattaggagacgtgtgtgtatatcaccagttctctctggcatgtaacagttaacaatttctatacagttaagtggatttagtgagtatcattcttccaggagagaagtaaaatttttttttaaagaggaaaacaaagaacaagattaagaacagtaaaagaataagtatggaaaatctggtaagtagcaaaaatcatttttaagcatttgagggagaaactgcaaaatctgttcagaagccacaccttccggcctgtgggactgcatggctgtgacactgagcaacagctgaagtctttattctctcggaggggaaggaaaaaaggaaacaacagtcagtccaggcttgtccacggctggaagcctcgactcctgcaaacctcctgcaaaccgatctcccagatcctttctgggcaagcacataaccaaaggaaatgaaaactagaaaaacaatttgtgcatggaacaatgacatggagtttcactttggtttcatgctcaaatatgaatgtggttataattttttaaaatatatattaatagaaggcaacgagttgaggatggtggcttcttcaagccgggcgtccagaagagccccacttctgccttggagcgcgccttaggcagcagtcgtgggaaagctcagatacagctgtttccaggcaaagggcccagagcttttcagcctcagccaccagggtctccagacaaggagaaatacgcccaaagctgctcccaggggctaggagctcggagctcccagtgtgggtctctgagcrgcgcggggtgggcgctcccggccctccagcccccaactccctcgcgcacccgggactggtgaaggcgcccagctgccgagcatacccgcgacgcgggttcaaatcccgccggctcccaggcaccctcaccccgccacagcgcgggctgtttctcctcccttccccggaggaattccttaactctccagtacccataccataacaaaggaggctcggtccaccaatgcgcgatcgtagcctacagggacccccaacgaaccccggcccagagaatgcacctggccgtgccacgcgcgacccccgaggggcaggcggacgggtccaggcgcggacaaaggggcctctcggggcgcccaagctcggggcgggacgccgggagcggagctggccgggaactcaccttcgcagcggcccggctgtgctcctcgtggagcagaagggcggcgggcagcagcagcagccagasgctgagccggggccccatggtggcgcgcccgaggcggcgagggacggctgcccggcgtgcgggggccgcggcggacagctagctctcggaaggccggacttccagcgctacgcaccgtcccgggtgcggcggctccaagcggagacctgagcgcggcgggccgagctccccaatttgttggcgctgccccctcccccccggcggtgcgcgggcggcgcctcaaaggggaggaccctgcggcgcgggtaagaggcggcgggagcgcgcggcccgggagtgtggctgcagtgcgccgggacaccagggctccgcgctccgcactcaagaggctcccgcgtcccaacccctcgcgcccgcgcgttcgcggatccaggccgaggaccgaaaggggccgcccgagcccccggggccggcgcccagagagcccagcaaggccggccgccctgccggtgtgccgccggcgggtgcttctggaagggccaatgcgttcgggcagcagcccctgaagccgagcccgaggtgagagcgacccccgagcggcgcccagaccctggcccgagagcaccgacttggagcgccttgtgcaggctagggctgcacgctctcctgcttgggagtagaaagggggagggtgggagagcgaagaccgagctcctcggccaaggagcacccacaggggcctaacggsaggctctccttctttccgggtcgtgggggggacggccctccggtcacccctgcatgcgggccgcgcaccgcgctgtccccgcgtctcgcggaccgagaccggcggtgaggatgggctgcytccctcatcctgcgctaaactcgctttgtctgtcgcctctaggctaagtgggactgaccggggcccagagtggacgaaccgccagcatggggagagaccagcgcgcggtggccggccctgccctacggcggtaagcgactttctgcctggtccccgtgggtcacgcgcgcatggacccttcggtgtaactctcggggactgacaagcygggcccgcacgttcacgtctctcttcctccctttcccatgcaggtggctgctgctggggacagtgaccgtggggttcctcgcccagagcgtcttggcggtaagtcctggctcccgcgcttggacttgcgcgcccgagagtggttgggacgtttgagtggccttggagaaggcagctcgtccgtgcgctcccgagtgtgtgtgtgcgtgtggatgttcgccaggctgcccaccaaggttctgagaaagcttgctcttccctcatcatgctttccacctttccttccccttgggttcccagcgtcaatcctgtgytttgcaagcgtcggcctttcacgggaactgggaacttaaaatgtagcctgaggcaccgttttcgttgctttgggcaaagctgcagccgtagaggccaggaaagwgtgtcagtcactaggcagtgagacgccaggcttarggcgaaaaaagttttcctggaactcgggagctggtggggagtctctgtcacggactgagggttttttgtgtttttaaatgggagtctctgggtaaaggggcggggcgaggaggcgaacragacaaccttagtattgtttgaattgaagcattgcgagggaacaatggcagaaaaaccgcgttttctcccaagtcctgttccggccctggaagagctgctccgggcgccacactgggatcctgttcgccgagcctgcccctccacgccggccgtgcacagccctgccgataccgtgggtgcagctggcgactgcactgcgaggctttgtccattttatacgttttgtttaaagagtaggakccacttttactgagctttatgtaaccatggctaaaatgaagaggtttggtasgtgaattcggtgcaggactcaaatgtttagacaggagctgaaagcrgagggagctttcgagatgtccgctgtccctcctctccttactgtggccgatggagtagccctgccctgtrgcagccggggcccaggtggattcctcctgggaacgacccctccctcctcagcgcgcrctgtgccagagcagtacacaggtacaaagggcaaacgtgttcatgatttcatttgaatyctgttgtttttacatcgttctgccctgatgtaaaacaaaccaggattttaaaggcagtgagtgatgaggagctactcccacttggggaagagctgctaactttacttttccgctgctgttggttccggttcaaagctcggtttgggaagtaagaggaggactcggagactttgaccagagcactccaggccaaagttttcttccagttcaggtctgtctcttcgtcccagccccgacttaagatcagaacctagatatttgaactagcccagtgaccctgtgaattctaatgcacaggtctgtactgcatgtaagacttggctcagatttatgaaccagaagcaatgcatgcacgcgcacgcacgcacactcaragaagggggcgatccctagaaaataccacatcgggctgtgtgtgctttggttgtgctgccacctgcacccctttgtcccttagagccacttttataatttccatatgttcatgcctaaggatggtgggagtcccaggtattcttttctgaactcatcctaaaattggtagaaagaccaccaagcacctaggtctaaagatctaggtattagcctgggcatggcggctcacgcctgtaatcttagcactttgggaggccgcggcctgtggattgcctgagctcaggagttcgagaccaccctgggagaaacacggtaaaaccctgtctctactaaaatacaaaaaaatcagccgggcttggtggcgcttgcctgtaattccagctactcaggaggctgaggcacaagaattgcttgaacccaggaggccgaggttgcagtaagccgaaatagcaccactgctctccagtctgggcgacggagcaagactctgtctaaaaacaaaacaaacaaacaaaaaaaacctagttactaaacatagctctgccctaatctcttaaatccagagccccagtttccgtactctgaagaattacggcttcacagaggccaagtgccctaaggcagataggacacctctatgcctccccaaaacctcatcattgctgcaagctcacccccagtctctttgactctttgatctttggatggcaccaagaacattgattgcccagcagagcttctcaaagtgcaggccccctagacccccagacctaaaccctgaaaggcttgttaagaagtcaggccccatctcagaccttcaggtcagacattccagggtggagtccgggactccgcctccccacatgataccagaatctgggaaccactgagctacagtattgggttgagaggcagttgagattacttgccaattcactttattttcctgggctttagattctaactcaaccaaaaaaaatagatatttttaatcattttactagggacctagtaatatgtgttgttaagagacatgtagtttgttacgttcaacaaggggctggtcttctacttactcacttcttggtaaccactggctttaatggctgttccttrtgaaataatgtttcaattttcaactgtattgattaaagatttttcttaattgtggcaaggactctttcctgygtaggtcagttcaggaaaaagggctgccgcygggagccctttggcttgttttgttycggaagcagctaggatgggcagtgaagagccttggtgattacttattgggcacttcctgtgtgccaatttgtctgtactaatgcttctaatcctcacaagcaagcacactgatgagctaggtaactattattacccccattttacaggtgagaaaagccacaaagggtttgcagccctcgcccaaggttcctgtctttgtaactgaatgagacggattagaacccaggcctcttcctccacaccgagcttcccagggcctgaaaggtggccgggagggcactcctgagtttcagtctttgagtctcctggggtgtgggtgctttcttcttggtcttgaccktggactaacagtggagcgggcactgattcctaggaaggaggctctccccctccttcctcctctgcttctcccactgtgaggatcaggggcarcaagtgaaggagagaagcaagacccttcccaaagggaggaaaggaagccgaaatcccacggggcagcctgggctctagactcagtgtgaacccaggtgatctgtgtgggcacctcaggacacactccctgctgtccaaggtgccctttctaaaggtgcccttgtttgaatgtggtgccaagatgcacaaaatggcttcgtgtaaggcagtgtgacacaggggtcccatcccagacttgaggcaggtgacggggtgcagttctcagtctggtgggcagctgaggggytgccgcctggggcggacattcgccaagcctctgcgtcctagttctcctctcccccaaaacggaggtgttactcatcccacccacctcatagatgggggtgctgtgaggtgtgtgggtgcatgtgaagcgccttggagggtctggcacagcctgggtgccaggaggtatcccctgggcctgtttaagggacttcccctcggctgcctattctaaccttcatggaggcttgaaagcactcactgtagccgctctgagcattgtcacctatctccagaggctggcagcagcctgagggatcaaatatgcagccggctgggtggtcayctgaggacctctggccgggacctggggccacaatagacgtgggttcacgtaggcatcagtgcggggcccctgcctgccaccctgccgcttagtttccaggctgtcctcggggctccagccccaggaaattcgcctgaccttcctgttggctgccaccgccttccctgccctccaggccggcagctgcggtgrcaagtcctttccgmaggctttggtacagggaggagaggtgttcatgccgcacgaggcccagagctttctgtaaggatcgggaaggacaattctttcctrcatttcctggagctgaagcgctattgctcaaaacatggccctctgagaagaagggaaaagcacggggttcctcctctgctcgtggataaacaagcatatctcagctctctggaggctgttaaagtcttcctccatgggtggcttgtaggacttggccacgataaataatagcagagatttgtcagcagcatcccagaaggagaggtgggtaggaagggtaaaccraaaagcgcaggagaggaaacaggctctgtacgaccaggcggctatgtttacaaccagagagagagaggtgaagaggaaaaggttctagaatagaaaaaagattttgctaaaataataaaaatcaaagaactgtgtttaattgtgtttctggggagagggaaagaaaatggrtgtgtagtttaaataatagagaaactcaagggaaaaactgagtgccatggagatttaacttttcaaccctgtgttgataatataatgaagagatcaccatctagaaagtggtttgagaatgtctcattctttttatctgaagaagaatgtttgtctttgattagagggttttagagaaagctctgaaactggcctcatgctttgtgtctgctggtgtctactgtgtgatcactgctgaaggtaggaggcaatgtctgcaacccccagccttggctgatagagcttgtgaatcagggaccaggaatgacacaatagtcttgagaggccataaagtctaatccagcctgttgctaaccgggttctgacttcagggcaagacactttacgtgctttggctctggagcctggaagagaatgttgtgtggaatggatctctcaggtgatcaacataccatgagtaagttagaggtcagcartgagggctggcctgtgcaggtgtgctaagacctgtgagggtgagccggggtctccgctgtgatgctggggatgagaaagcccttccagataagctccagaatagaatctatccagcctgcaccaggatatcgcttagaaatcaatatgccacatgggactttttatcttcacggtgtcgagaagcttctggaatccagtaaatatgtgacatttctcagttgagatgaggaaaagggcagagttcctggatagtcccctcttgctgtttccctctggtgcccactcccttcagttaatgagaccctgtcaggacaggtgacggcctaagtgactcactgctcttgatttcattggtggctccggaggacggtaatttttattttggttacccctgaaaggagaaggcggcatctaattctaggragacttcacaggtgtctccagtcctgttgatgtggccagagagtgaatttcaaaggacgtgcgagcagccggcgtccacccggcaggctcccaccccggtgccccgcgtccacccggcaggctcccaccccggtgccccgcgtccacccggcaggctcccaccccggtgccccgcgtccacccggcaggctcccaccccrgtgccccgygtccacccggcaggctccyaccccagtgccccgtgtccacccggcaggctcccaccccrgtgccccgygtccacccggcaggctcccaccccrgtgccccgtgtccacccggcaggctcccaccccrgtgccccgygtccacccrgcaggctcccaccccrgtgccccgygtccacccggcaggctcccaccccggtgccccgcgtccacccggcaggctcccaccccagtgccccgtgtccacccggcaggctcccaccccggtgccccgcgtccacccggcaggctcctacctcggtgctgggttccagcccctcccctgtctcctgagctcctggctggctcctgagtactctgcttcactgtcttctgttgccttggatgaagctgccttttgaagcaacatgcttttttgtaaaaccggctcctttgaagtgcagcctggtatcctggggcgggtcctgggacagaaaagctgcactagtggaaaaactggtgagattctagcggaggctgcagttcaatgtgataatgttgatttctgtaccaatgttgatttsttagttttcacagaaatgtgccatagttttataaaatgtcaatatgacatcatgatgtctgggtgaagggtatacagggactctctgtactatctctgcaactcttctgcaaatctcaattgcttcagaattttaaaatgctcccaggagtcarcagccagtcacatttggtgtgcatgggtcagatggacaagtgcatggagaaggctgaaagcagccagtctcgaatgagcagatgtgggcagcaagagggaaatgttgctcccattcttttctctcatagagtaagtgaacagaagtctcttccacttagtggaaaatacagcagaggtagacccaagcgaagcctgagtaaaaggatttttgtcccctggccgtgggtggagtcatttgtgaagacggggaggtttccctgtggagtttctgcagcaccacatgggaggcccggtggagctgtcatggggcctcttcttcgctggggagggaagtggccgctccgttgtttcctgagcccaagatggaagggcaggcttgtatcacagtgtcgctgcaaggacagaaaactgacagtggaggagcccggtgctgcccatacgcgctcacccctaggaacgcatcaggcagtaccctcgtgccctcctgggctgcacagaatgggagcccccttcccgcctgcctaggaaaccccatgggccacagggacgggcaggtggcaggtggctggtggctggtggaggacttaggcctcctgcacacgtgggtcacctgatagaaagggacaggccatggcagtgggattcagagtcccagcctctcagtggcctcagcttctgtgttagttaggggccaagggaaaggggcctggagccaggatggccagtggctgttgccttgcacagttgcctgtcatcaccctgccattgataactggaaatgagaagcatgagcagagccgcctctgcccggcccctgccagttctgctctgcacaccctgtctgcactccaggccttagccccggggggataaggatggcctgtccctttctatcaggtgacccgcagcaggtatcacacacctgcacatggctggagcctctgtcctttgcaactgaggcccatttcagggtctagctaaagtgtcttctccactgataggattttaaattctttaggatcgaggattataagtcatgattgtagctctatagacttgaaacatttgtcttcacccatcatccactttttttgtttgtttgttttcgtttttgttttagaggtggagtctcactctgtcacccaggctggagtgcagtggcgtgatcttggctccctgcaacctctgcctcctgagttcaagtgattctcctgcctcagcctcccaagtagctgggattacaggcacgagtcaccattctcagctaacttacgtatttttagtagagacagggtttcaccatgttggccaggctggtttcaaactcctgatctcaggtgatccgcctrcctcagcctcccaaagtgctgggattacaggcatgagccaccacgccctgccatcatccactttttctcccagtaacatgtcttctttagctgacattgctgttcccacagtccaagttcagggcatcttgcatcggccctcatggaatgattcatgggtacctttatctgcccgaggcctgaaatacagtgggccctcaacagagcttgttacataaatgattgcagttagttggcagcaatgcaagcagatcctttggatgaggagtacagtcatggaactattaataaaagaggagattaaaatgtatttattcttactgtgggtttttttttcccaaattatctgctttctcccactggataaaactagccgtatatgatgataaaggaatcatggatcagtctgaaagatttgcattttttcctagggattgtttcaaccccacccatagaattcctgttttgttgcttttacccagttcagtgatctctcatgtgggaattagagaagaatgtgtgtttttgaatttcatggactgattatctggtacctggtggtaaatattatataacaatatttttccacatgttgagtgtttttggatccctgactgtggagtaatgggaccctgtgagatccaggaaaagggcttctgttggtgcacagggtcagacacacgtgccctggactgcatcaaaagccatggtttgtccacgagagaaaggagatgccgattggcagccgtgatgcaatcattgcaaactgtgtcgggaaggagcatcgcagcgatgcaggccctggagccaccagcccggccctccttcccgctctgtcctccccgccttccagtgacactggctccagattaggtgaaaggaagaggtcccctgggagattctttgtgggatcaccagaaccaaacctaagagagcatcctgaagatgcttccagcattccagaacctctcggagcagctaaaacaccctgcgaagaaacatagcaaatcctgtttgctgagccactggtgctgcaaactgctctaagccacggatggttcacagatgggtaaactgaggcatgtgcaggaaggcacctggtaggtcaataggaacaaagtggggagtgaaacctagaacttgccgattctaaaacctctgctcttaaccactggctaggtgaataagccccagccacagaatatatatacacgtcaaaatacagaaattgtggtacatgtaaaacatagatatgtatattatatgtagaaaatatgttatcaatctacatggaatatacagacatagatgatagagataaaagagagagagaacacacacatacatatgcaccctgtactcacacacacacagacacacagatgcacacatacatgcatgcacatagacacacaggcacacgtagacacacacatgcacccagcacacacatacagacacacacatgcacatatagacacacttgcaccccacacacacatacagacacacagatgcacacacacatgcacatagacacagagatgcacacatagacacacacgtgcaccccacacacacagacacacacatgtacatatagacacacttgcaccacactcacacatacacacagatgcacacacacacgcacatacacatagatgcamatacacagagacacacacttgcacccacacacacacagaaacacatgtacacacacataaacacacatgctcatgcgtgtacacacacacacacttagcyggaggacrctcctggtttctttcttcatgggrgcagccaaggcagaaaaagactatacctgcctctggggagcatcaaacagacctgtttctttagggtcccttctgcakagaggctggacagaggcgggagggtgactgagtagcctcatgaactctgaaaagtaaaggctaagatgactgcactcaggagaggcccttaaaggatgaccaagaaatacatgagaatgggcaaagggacaatttcacctgcagaaccaagagwcctgcagacacaacccccaaccggccctctccaagtctggcttgaaactccgggccactggggtaaatgctgctgcagctatgyaaaggggaaaaggaggggcaaacacggctttatgtttggctgttggaaaattctgctagtcctaatttagagaaagacttactgaaaygctatgggcaaaagagaccttcccaaaattatcttagacgtacaggaaacccagtgggcactacagagagrcaggggattccattttccctggaccaatgccagcttccttacgctgggtcttctctcaccgccccgtgtttgtgctgctgtttttcatggaagtccccatgcgccaacaggaggataggtgtggtctgttaaaaagaagtggagcctgtgggcttgagcccagcgactgggaaaagtcacttttcctttctgagaatgcttgtcttcatctgtaaacgggaatactgaaaactatgtcccagggtctcatgtatgtgacattcgttcattaaatgaacatgtctgatgctgctaggaataattcactcacgagttctagaacaccatggactcgtgtctgggtcagagcaaggacaagcaaggaaccgtgaagtctgatcagtgtgtgtgtgcgcgcgggtatggtttgggttgtccaaatatctgacccaactttactttaaatatgtcatctaggattattcatggtaagaaagcaacctgcagacgttcactatttgagagccactttatttgttctatatgagacgttcagtacgattgattttgtatgcagttgtactcatcagcaagcacctataagagcccccactcaccctgctcacaggaaatgtcaggactcaggcatgggccccacagaaatagggccagctggggtcttgggttcgaaactgctgttgctgctgcccagccaggtgatgttggtgcgagtattcaactctttacactgtagttacatttctaaaactgggttaaaatagttcttaccttatgcacgtgcccagaggagcaagaagamattggctgtagagagtttagcaatcttagcattgcggtgcttgatcaacactagttcayatctacctggctttaggttgttgttttttaggtcttcatcctcaatacctaaagaacttgaagccacagagagtgaagttcaagttaactagagttattgttaactctagttaacagtatgaaataatgaaatattccatatttcattatgggcaggttgggggttgtgtctgcaggattctcggttctgcaggtgaaattgtccctttgcccattctcacgtatttcttggtcatccttgaagggcctctcctgagtgcagtcatcttagcctagagttaccttagccatggtactgggacaggaggaagtgggtcagcaggactggtgggtgcgggggcctgtggggggaggttttagtcttcacgattctggtgcctggagtgctgagaccctggtggctctgagcagatggctgctgagtgagaactggtggagatgcgccttcctgatgccttgagacggttatttccattttccttaagtttaggaaatgtcacccaaaggaaacattttaatattaattaaatttcagtcaaggtgtaactaacttatttccagaacaaatggaaacacttataaacaaagaacaatttgttcaaataaccatgagatgcaagtataatttagcaaagcaagaaaactcaagaggctttggtttggcaacatgacataaaaatgcagaacagaatcttaggagagagtttccttcttgagagagcagaaagattccctccataccatttcctagcagcgcaactacttctcagattagcatggaaaggcctcccagactagcccgtaccctccaacagccaggtgagtcaggccaagacgtgggttccctgaggaagattcccgctggaaatttcagggaagaacctcacctccttccctttcttccttatttggtagttgtcctaattgtaacaagcatccaagttacaattcaagaccaagtagggacctgaggtgatctcctgtcctgtctgaaatccaccttcctttcctagctgttcccgccagatttcagcgccctcttcccttctcctcccaagacagtcttagctcagacaggatttccttagtcttagtcatcagctcttattgtccggcctcctccttcctgttgtaaaacaaggaatcttaacagcaagtaggccaaaattgtgtatcttcagtgatatgtcaatttcctgccggtaagtgcagacatcaggttttgtggtggttacccacatcaaggcgccagaggttggaaaagtcaacgcatttctagttaaggcacaccgcacagtgagttttcagctgtctgccttggcttttgtgaatgtgtctctgtccacccgaaggttctggttctcgcatactgggctctccttttgccaggcgcagccgcacaacccaggaacagtcctaacccattacataaggtggctaggcggggctggcgggtggcactgccaggtcacctccgggcactgggtgacccagtcattggccccctacggcgaccccctgccgcgtgggtgccactggcacctcccctggactcccagtgctgtgatttctgggcgatttctctgctctccaacaagagtgatttgttatctgcttctcacctgattggaatttaatggtctagaaacaaatgagttatttcactcaggagggggaaggaagtcagattagtcatgctggtgcttgatttttttttaatccaagaattctttacttaagaagtaaaagcaattaagaatagtactgaatcctgcctagaagttccagaacaaggaatgggatgacaccgatagatatttcaaataactggaaagtttagttccctctgaacaaagtctaactctgaggccatctgcttctttttatatcaaaacagagcagcgtctcaaagaaaataagtgtatttaaaaggaaagatcataggtagatagaattcatcygttttaaaagttgcctttttctcctttttatagcacctttcaaaaacatctcttctttcaacacttctagctcatcagtgagagagaacaaaaggctacaactgttgattcaggcaacatttttgccttcatgttgatttttcttcctcattgggtttaattaactagagtgtctaagaataaacatagaaaaaaggcctgtttcatgggcttttcttagtctttcacatttaaaaaaattaccttagatctttattctttctaaatatttcatgtgtttaaaaactaggtaactttcctgtaataaaaaataaaatcttggcacattatcaatatagcacctaccttacaaacacagtgttgataaactaaccatctgaagataatcttactaatgtcacatcaggtctcatatatgtgcgtatttatatagtgtgcatgtgtgtgtgtgtgtgtatgtgtctgtgtgtatatatatatatatatacacacacacacacacatagagagtgtacatatatatatacacataatgcaaacctgtgtccatttttaatatttttttcattgttttaaattgtggtaaaatatatgtaacataaaatttaccattgtacccatgtttaaatgacagttcagtggcattaaacatatcacatttttgtgcaactgtcaccattgtccgtctccagaacttgctcatcatcctaaacagaaattccatgtgcattaaatacctctgcatcccatccttcccccaccctctgttaatctattctactttctgtcactttgagtgtgactactctagggacctcacagaagtggaatcaggcagtgtttgtccttttgtgactggcttacttcgtttagtataatgtccttgtattagtccatgttcatgctactgataaagacataaccaagactgggcaatttacaaaagaaagaggtttaatcaacttacatttccacgtggctggagaaacctcacaatcatggcagaaggcaaggaggagcaagtcacgtcttacatggatggcagcaggcaaagagagaatgtaccagcaggggaaatgtcagatgcttataaaactagatctcaggagaactcactatcatgagaacagtatgggggaaaccatccccataattcagttagctccacctggccccacccttgacatgtggggatgattacaattcaaggtgagatttaggtggggacacagagccaaaccatatcagtcctgaagatgcatccatgttgtagtgagtggcagaatttccttcctttttaagccccagtaacagtgctatgctttttaaagttcttatttttaaactcagttttgtttctttggttgacaggtttcaaatggttaatgtcaggtattgcaaatcagagaggtttaggaaatggcgatgtgagacccagctccagatgaaggagcagggggcaaggaagcctggggctggcctgcctgcctgtctctcggaggcggcctgcccgtgcctctgttcttgatgtttgttttgctttctggtaaacgttcaccactctcccgaaggaggttggcttgggccgcactgagttggtttcctctgggacaggcatgggaagctgtccaggagggaaccgggtgtctgggtgggaagccagtgagcgaggtctgggttgcccacacaggtgcaggcaccagacctaaagcagttctcctggagcagttcctgaagccccagaactgcgtgagattcctcaggaggaggacaggggatggacgcgtcaagacaaggggagaagacatatggggaaccccgggaggggctgtgagaggaggctgtgatcgggtgcaggcctagatcttccccatggcttcaccaaactgacggtcaccagcctcccctcttcctgtggtactggggtcagaagatggagagtggagacagggagccgatgtccacctctggtcactgcccttcttccctgctagacttcaggttgctaagggctgggaacttggtttattcatcaccaggtcctcccacagcacaggaccttcacatagatgctggagtaattttattaaatcagtgtgttatttaactcttccacggggaccctaagatagttaaggtttctctgcaggcgcagctggcagcatgatcagaggctactgaggccgcccgagtcaggtcagctggagcgggagggcggatgcccagaggaggctaacaaagggcgtgttgccatctcctttttacattttgaaggctttggcatgacccccaataccagctgttacaaccaacccagcctgggcactgttgcacagtctaggaggagcaagtagacaaagatakggatccactgattctatgaaaacttgcagctgattgaggggaggtgtcagtccatgrgaagtccataccacaggggttgggagctacattccccagagttcaagggcctgttgctgccccactgccttagattcctatgactggacatcagaggcccactggtgactctggaatttctgttgcaccctctgtggtcagggagctctaaccaggtgatgccccgatgcctgggaggaggagcgcatccacaggcagttccttgcctgagatgatgtcaggcatcgggatgagggccccccctgtggaagctggacagccgtcttgctgtttgcttttatattttttgagttagtcatgctaaatataatgtctctgcagctgtaaaacctggagctgaagagaatgagtgtctgggaagctgggggccrgcccacrggctcctctcctagacagacagagcatgcaggatgcccagtgccagcttcccctacctgctacctgcagtattgcatacaataagggcaggtggagttgaagtcagaaaattccaaaggaaaggggcttcctcctccacaccaaatctaagcacaggccccaggtggctccctgaggacagggaccaagccatgggcacgctgcccccagcgcccagctgggcatctgctgtagcagctggagtctaagccacacaatagacagagctggtgggaggaaagagagagggaaagtcgagattcctggccaggaccgaagctaagtagtttggggactttttgttcagaatcacaacacaaatcattatgctgagtgcgaaaggcatggccctcaaaaatgtgcaccttgggtcaactgaaggttcctctctcattggtttcacttgatttgaattacagtcgaaaaaattattgggtagacagacattggcttatctgcaaagtcaaactaatgcaaaatatgcttcaactgcaagacagagtgccaaactatttcaatttaatagcatggtttttttttttcttgagcttcaatgcaaagggaagccagrcatctggccagtgagcagtctatgagctgagctgtgcttttcttcagggcaggcagaggttggccagtggccttcttggcactcccagaaactcagcttcatgggcgtcaagggtaagaatgtggaaggtggtctggtggccaaaatcacacagtccctggatgtggtggtcaccatccaccaatgtccactggtgggcgataactggactcgctccttcttgacacctgtcctgctgggctcttgatattgaggctactggaggaaggagcttgcctgagaaggcacttccacaaggagagggatctgagtccacaggggaggggaggtctcttcgcctgaatgcatgagaaagcatactggacatgaagccccagtcctggctgggggtcagaagagatgggccggagcagcactgcccraacggatgcacgtttgactcagccgatttggatcaggcaggtctggggctcctgggactctgcattcctaatgctcccaggtgatggtggtgctgctgcccagggtgccacagtgagcagcaggtcctagaagacagcctctggagggctcttctggcctcgggattgtttctgccttgagtggttgctttctagcaatagaaaaatgtgtaggtggggcctcccggcccctggaatctcccgccaatctttaaaacgtggtgaggaccaccctacgcttgcctgctgattgatacagctttaggaattgggtgagggaaagataattttcatctgttggttctttggaagggttaaggaatttctcatttacaaagctctttatcttttgacgtgtgggactgagccttccaggatcatgtcatgcctgagagcacgttcgacccttagcatggcaaaagcagccttcacrtgcacaaggaggatggggagaagaggcatcgtaactgactgtatgaaaacgtctgcgtccccacaaagatggactttcttacaccatccaccttagctcagccttttaccaaagtttaagccacatgtgtccataataataatcggaaatcaacgcatttttaataagcatttagaaccaatgwtcagaaacagaaagtgacactaatgctttgtggagagtttacccgaagatttttttctctttgaaatgaagtcaaaagcacattcctccccacctgttacctccctaagttgttaaaggcagccctgtttctcctggagtgatacttgattctccctggtgatggtctgccatgcattgatgggctctagttaaaacatctctcagacagagtcctttggaaaattccatgaaagaaaccgcctattagagataaaagcaaaggttaagtaaccagatagatcatagaagtgtctcccagggaaatcgtattggaagatcagtggctgaggtaaaggacgctgggcttgaacacttaactaaggctgcctgatcactggaggcttcctcctggaggcttctaatccccgtgtcgcttcagcctttctgtcttctcagattgcttaccccggtaggtgctgcccttcccttcgggacacggaagctacactttgctttgtgcattgtcaaggaggagaaacaggcacttcctgccttatgaatgtgtcctgttcctgaatttcttttttttttttttagacggagtctcactctgtcgcccaggctggagtgcagtgttgagatctcagctcactgaaacctccacctcctgggttcaagcgattctcctgcctcagcctcccaagtagctgggactacaggcgtgcgtcaccaggccgggctaattttttggtatttttagtagatacagggtttcgccacgttggccaggctggtcttgaactcctgacctcaagtgatcctccctccttggcctcccaaagtagtgggattacgggcatgagccaccaagcccagccccgaatttcattttaagtcatttgctcagaacccagatggcacctgcccttcgcccaggggtgaggagcttccacctcggagttcaaattcatctccatcagtccctgtggaacctgggaggagatctgaatttttttattggaaaatgcatcccctgtgagatgaatttataatcctccctcagcaagttgctggtagaattaaattctacagtgtacataaggtacttaaccacagtgtctggcatagaataaacacccaaaaggtgcaattcctgcactttcctctctaycctcgtgcacctaaacctcagcctcctctgtctgtctccctagtggcagctgccagccttctgctcccctgagtcacggcgtcttggcaagtactgcccaaagtgtttcaatacagagatagctcttcagcctctctttcccttagcacattgcaggccccaggaattgtggaaacaggctgtttgaggacatctgtcatttgagctttcactcaccccagcatgctggggcccttcttgggccctgcagccttcagggcgaggtcacacagaggggacacgctgggcccttcctgctgccccgcgcctgtctggctgcctcatcagtgactcctggtctgctgggaggtgcccagtggaaccccctacatcccatccgattcctaatctatttcctggtggtcaacctggccctctgctcggccacctgtggacagcactgccttcccttgagtgtgggttggttcccaacatcagagcagttcacacagtctcagatggcagtcacccgcccgctcaagagcgtgaccactttgtgacctgatcaaagatagacaataagcttggcttcgtgataagcctgtttaatgtatcccctcctcttattcccagaagttttaagaaatattcaattagcgactcagagtcacaacccagatacctctgcctgtctccagcagacaccgctcccaccccagccctgtggttgctaacctgggctmgcctgtccccagcacacacacacccctcctgctccaactctaaggtgctaacccaggctggcctgtccccagcacacacactcttacatctgctccctccctggtttatgattcccagggggcccccacccatggaatttgggcgtccccagttactctggttgggttgtttacccctccactggcttgcttcctgcccttcccggggggtcctcaccaacccccaagagctcagcacacacaatcacccactccgggtatttcagacaaacttctcctcgcgtcacagaccacatttgattccatccaaaacacaatctgtgatatcacctccaccacccaaccagccstcccagcaggtcagtctcagaaatataactctgcattttacatttgactcttgtcatcaaaagacaagcaattgaatgtgctttagagtgattctcttaaatagtcccagatggtttttaagtgtgtgtctttctatagtgaagagattgggggtggggtgttgggttggaaaacaaagaaattcagcttgaagtagtcagcttgtgttgttttaggagaggaattcattctgtgggtgtcagtgaagcattaaaatccccccaasagctccagagaaatagttccctgctgtggcccacaccccagctaattctgttttcgtcattagttaaggcagttgtcctgggtgaagtcttagcacttgtccatcatcttttaaaacttaacgcttgaagcaaagttgtgactgtaaacagctttgcaactcttcggtcacacacacaaaatgattcatttctcatagtcttagtaaagtctaaataagtttttatcatattttcctaaaatcttttttatgaaaggttttttaaatgatgaagtgatgtatagaactgttaactcaaaatcatacaccacaaacctcatcaacctagactaatcactctgactttgcagtaaactgtaggcaagaaggagtcttcagttaaattaatagtctggaaaagttgatcaggaatataatctgtttaagaaaaaaatcttcttaaggaacttctgggacacttacttgtgggcaaaaatcaaacgttcttgataaatattacgaatttgtttaattcrtcctgaagagcctctgtcggaggaccatgagttccttgctcagttgttggattgtttaaaaatcagttaaacattgtttctgttttcaaaattttccaattcagatattttttctgttccaccattaaataaaattaggaatattttccactctggcttggcatgggagaagagacaacccctggcaggcaagttcactgctatctgaagcaaatgcggtgcaagctgagatttgtgtccatcgagcattttactgtctttctctgtctcatcccttggtttcatgaaatatgaaaatagaacagcgcacttttcagaagaaatcgatggctcagacacatttaccttaatgggctgctgggcacgtttaattcaacgactgtgcggtggtaaggatggtagataaggacattgttctctgaagggctsgttctagaccagcttgcccagactgctgtgaaggtgatccaggggcccagagcagacagagagatgacgcccagagagacgggcgggctccgtcacccagcagcgtctcctagcagatctgagatcctagcggatccaaagctaccatggagccctagtccactgcagtcttgataaactcatgctgtcatctaattcactagctaaatcacttcatatattagatcactttttgagaaaattacatgactcactgtttttaaaagcctgctttggaaatgatgaacagaaccttctagtagtccaaaacccattgagctttgtagaacaacattatggaacaaattttatacttctttgaggtcctgtattctggcgaaaaataaattcttcttctattttagcacaatgtgtttaaagcccataatcagatacagaaatagaaaacatgctaatctgaataaaatgaagaagtaaatggagaagtttagacctttaagcaagttgcttgttacttcaatacttggggtattcgattttttaatgcaaatgttttcaaagatacactaattttgaaataatgtaagacaccactgcaatcactcttacrttcccggtagacctctgagagcagcaaccaccctccaccaccccactaacatcatcttgaatcaacgctttaagaaaaaacatacttgctgcagtggttctggagctggagaaggaagatagagccagccacaggtgggcgtgccctgcaggggaaggcgtctagtggtccctccgtaccacagagcattcccaccctcttccctcactgcgggtgccacatatttgttgtggtttctttgtggttgtcaaagccaagtttcataggtgttatctcactttatcctcatggcatccttggaaatagagggcacaggtgcagtcataccaaatacagacaaaggaaaaatgccagtggaagtcaataacatgcctgaggcctctggtttgtgaagagctggtgctggaaccctgactttcttttactcaaagggtttgtcccaagcgaattattccaggtccacacggctctgtttgaagtacttcggtggatgcatccatctggtattctcaaccaccccatgaaagagacagaggaaggttatgaccaccacggcactggcaggaggagagaaaaacgcccagtgatggctcagcacacccagcaaagtgcataattccagagggtgaagggtgagttggtgcgtgcagtgaaatacgatatgacgaggccaacttttcatctgtttaaaggacaagaccaagtgtgacagattcaagtatatgtctttaagttgccaratgaacactgtgtgtattttgctttttggtaaatacaaattactcttctgaaaatttggaarcactgtgacagttttctaatgaaattagacggagaatgagttttaccattaaggactcaaggctttccacggcccctttaactgagaatggaccttgattttgttttgcgagtcactcttacagctgcatgacttcatctcaagcaagctaaataaaggaattttcggtattataacggtcactaagcagacaactgacgtgtcagcgattagaaggggtaaggtttcggggcgagtgtggaaagatactgctgtaacacgatgttttactcggtggcttcattgtgtaggtgggtggcgagtcggaatgaagctgggaggcgcggggtggaggcgggggggcagccccaactccagagctcttcccagccagaatgtcagtctgattggggcaaatcccctgaagtctattgaaactccccatctgcctgttcacaattcatctaagcaactctgaaaagaggataaacctcctcaggccagtatttctgggattctgttatggttcaaagcagagtgcatatctttgtttttccaagtgtccgatgtctgtctacctctcctcttggaaacgcttctccgatccgcagggcacgatggggtccccgcggcctgcggtgccttcccaggctgtatctacatgcagcagggctgacttgggccttctcctttaaatgaaagacctcctactagatactttttgctgagagcaattagtttccaaaacagcaattaagaagagtttgctagcagtaactgccagcagagttgcctgttttgacctattttggctgagtggttcctctctaaatggtttggtaatcagactattaggctgctggggagccttccccaccacattcctctatggtgtgtcttccatctacccgatctcgccgtgccatcactactcatgaaattgctgtttaaataaaccctgggtgttcagattctcttaggatcagtaatatttttttctttccatgcagctttttttttaaaggaaatttactgatataattttcttctagaaagatcacaatggtcttaccatcctccaaaaatcagcttgaacattttatactggtcttaaaatatgccaataaaatcgtgtgatagtgccaggccattgcaaaggacagagaaagtcatatattacagttcccaattatttgagartcatcctaaaagwggaggtaagaacagggttatttgagagatagaaaacctaccccaaatctccataataatttttctgcagtagttttccttttactcatctcagatktccaggctgttggaaagaggggacgaatcctaatttttctggcttattaacgtcaacagtgatgaagtcctggagccaggagagcagccggccgtggctgccttggcccatgcagactcacgcctgaccctcgttactgggccgctgacttccacggtgctgagaggtgggaaaggaggtgcacccacagcccatgggaggtggggagggtgatgtgttcacagaccgccggcagctcttgattcaaatcattcacaaccacaaagccaagtttctaagaccaagggcagtaggaggaatggaggcaatattccaaacaccgactcaaaacmaccaacaaaagaatgtgctatctagtatttactctcacaatgtttgcctttctctgattcctaatgagttcaagcacttttgtatagatctactggccatttggttattctctctgtgatctgccacttccagccttgtgcccattttcctgttgggtgtcattttccatacccacttgggaactctttgtatcctaaatacagtcgcccatttggttacctgtgttgcaaagaccttttttcactctgtcttttctgtcttaatgatgtccaataagctgatgcctacgttttattgtcatccaatttatcaattttttatggttagtgttttcccaagctcattcattaattctaaattttacaatagattctgttgtgttttctrtatgtaaaatcatgtgatctgcaaataatgatggttttacatccttttagtcattatacttttttcttttttcaaccttattatactgtctagaatatattagcaatgttaagtcaagaaaggcttattarccaagtatacattaagtagacttcaccaaaaagctttgaaatgcatattgaaacctacataagggctatttgcagaacccaagctcacatttaaaaccgcgggatctccaaaatagctttctggactacctttgaatggaaagggccatggcaaacaattttccaagtcctcctcatctttagttaggtttcggtcagagattcaaatgcaagagggatgtaaaccagggatgaagtgatagtggcagcaacacaagttcgttctcctgtygcartgatagacaggacggctcccacacacagcaccttcttctagagcacttttcctcctcttctctccttttgtcctcttgagtttgaacattgatggtggtacatgatgttcctaaaaagacaagcacaggcagatagagagaaaygttgggcccacggaaatatgaattcatccagatttctactgtgttaacttttaatagaggaatccccttctatgtttgtaccatgtgttgccatccttaaaaactctgtgttgaaaggtgaccaatgagtccttccagtagtacctggtttccttagtaattgacttgtcacatatttctgcatcaacagtattctcaaatgcacgcttactttcagcaatggtgaagctcactgctgagctcaaagtccttcacaatctgaacacacggtgctatttccagaagcccaaattcccatggtagctatgtaagttgtatctctgagtcagcaagaagtgggtgcatgaggcttcccaacccaccaggtccttgcaggcagccaggcttgcttctggagagggcagagggtgaagggctgcagctgtgcatgtggtcagccccatcatcctaaggagatattcctgagtgtccaagaaaagcactgctccaccctactttctgaccttgacttatgacccctccaggggtgtagtgaccacctgaaggccactggcccggttactcagaaatgtacctctttgaatgctgcctgcctcgaggtgtacctctcatcatcacagaaggaccacygcttactctttgttaatgaaatctgagatgcttccaccttcmtattcttggaaaacattaggagtcccacacctcttgcagccctgatgtcctgggacccagtgtccatcccacatccagcctacttcgtccaagccaggtcctctgagctgtttgctgtgacattcagaggcagctttgctatctgtgaggtgtgttctggtacctacaggctccgtgagcastgtctttcctcactgatctcttytttaattctcttcatgggggcgatttcttgtagcactttttcttctccaaacattttctaacttacctaagatgggttatgattgaggtgtcccctggctacgacctactgcacctgagatgggaagaggaccgctcacgaacygtggtcctgctcccacaccccaataatgtacaacttttcatatygggacacagccactgcctctgcgagtstgaactcgttgccatatttctgtgtgcttttattctgggccttgggcagtcccatctgttttgttgtatagttatgattataaataataagagctcttaccttgtgtgataagttcttatcacgatctaggtcctgggcaaggtgctttacacgaatgacctcaagtgacctttagattaaccctctgagataggaactaatgtcatcctcatctcacagacaaagaaaccgagtctagaaagtcaggtcatggtggggccggcaccgcccatggagctggacttgggtgctggccccatgctcctgctgagttcggctggatggcagtgaccrtgcttgctttgagggcgagggtcacacccaggtgtggcctgtgtccccaggtgcctagacacdgcctgaacacagaggcgtttgataaaaaatgtacaatatgacgcacagtcagtgcctctctttggggctgaatagcgcatgcccttaggttggacagtaaaatcggccttcttgacattcagaaaggctgacccagctttggaactctgcttggtttgtttgttcrttcctttgtttatcaagcacagcagatgtggcccgcatctaacctgttgtgagcaccaccaccatctgcatgttggaagtgcctgcacratgccctaaggattctgttccagaggcttcccttagatgagaccacagagcagccgtctgcctggggagcagacccatggccgcattccagaaagagtgttcatgctcatttctactaaaatccaggtttcgcacttggaagcggcttcccttcccaagtagaaacacattccatttccttcatacctgtcgtggtcatggcacactcattcaagatgtttatgagctgaacatatttgctccttacagtgtggatttatagtctaagaaacttggaaaagcctccatgcaggatattgtgagacaggtcaagaaaattccattccccaagaacaaatgttatgcagccagtatataacaatgctttgtttatgcagagcatttaggaatatggagaaatgcttaatgtgaagacaaagtaaagatgcaaaattgtatagaaagtataatccgagttatgtagaaagaagtgcaagagaaaagaccagggaaaatgctgaacgttctcccggagcaggcctgcttcagccctcggtctgattcagcacagtcagatccacgcagcccgtcttcagtccagggaggaggaagataaagagctgggggcccagctccaggtgacctcaactatctctctgtccctcacctgtgctgctgccctgatccctgggcatcttccctctgcagaggccgagcccccagcctgtgtcacacttctcatccctgggcttctccttggccctctgggctcaggtgcagacattcatggatcctgttcattgatcctgtggttgggagtctgctgacctcctccactgcctgcaaccgtgtctccaacacaggcgactcctgagttctctttgtaatgcttcagccatggctcctgctgtggtttggctctgtccccactcaaatctcatcttgaattgtagctcccataattcccacatgttttgaaagggacccagtgggaggtaactgaatcatgagggcggtttcccccatactattcttgyggtagagtaagtctcatgagatctgatggtttaataaggggaaaccccttttgcttggttatcactctctcttgtctgccaccatgtaagacgtgccttttgccttctgccatgattgtgaggcctccccagccacatggaactgtgagtcctttaaacccctttttctttataaattatccagtctcacttatgtctttatcagcagcatgaaaatggactaatacagctcccttggtgcccaaagtggtgactgagctccagtttcttgtccctgatgtccactctggctgatccaaacccatcacatgacaaggcttggccacccatctccaaggtggtgacattttactctcaaactgaagaagataaaattctgggatccaaaattactagatgcctttcttctatggagtttaaactacttcacatatactatttcactatcctcacaccacgtttttgaaacaagggtgggaaacagatagttgtggcacacactgttcaaagtttccacaagatcctggaagtctgctcccctgtagtgtgctttgcaaaaagaagactctcrtgggcttctgttggcaatgtagactcatccagtctcctgtggatggccacttcattacttctaacccacctttccccccagagctgacatatgtgaaaatgaagactrcaaaaatttgcctctatgtatcttcttggagttttttgatttttaacttttttagtctcggctattttgaactattttctccactgctctaatacattgaagtagagaattgagagtaggccatttcctcttttcctggaaaatattctgatggctctctttgataatttgtctgattgtctcaagcataactgatctttcatgaacacgcagggaatcataatggcgctgcactcggaaagttgagtataatggtgctattcatgaaaatagatgaattcaaaaaaatgggaagcgaatatcaaaatgaagttggacaagtaggtttttataggctccataaaacaaaatgcatcttagaagaggcctgggaggtgggataacaatagcsgccgctggaggagggctcctgcgcgctgcccagggctgggctttctttctgatccttacgacgacctggcctagtaggcctcatttcatctgtaaaggactatgttgtggaggaaagagttaaacatactgttgttccctttcctggggaaagggggtccctttttatctgcatcaggggttttgcttggggaatataggaggcaggacatggacctcagggggtggcatctcatctgcaagcagctcatctgggagcttccttcccgaggatgtttgaacatattatatacagagccttgaccccagggccttattcctgaagctttcgttgatcagcttctgggaagcctccagcaaaggcagttcttcctctgctccctctgaagcagttcatgggaagagtcaccacattcagcctggggctggcatcctctggacaacatccattcccacgtggcctgggttgcctctgtgctccttcacgggacactcacaccagttcctatacaggttacatcagaagttcccaaatgttgctctgggtactgcactggttagcaatgcagttttcaaagttccaaggagaaatgaggggaaatgaggaaaacagactgcgtttatctatggatgctgatgctgttttgtacacgtaggacgtataatatatgctcactgcattcaatccgtaagcctgtaggccagtgacagttgcagtcctggcgctctgattccgcggttctggaatggggcatgggcgccggaagttttagaagcacccggcatgatgctgatcacagccaagtttggaaaccactgggctcgtgtgaaggacactgtaccctgctgtttggaatcataaacgtaagatttaaaatgggctttcctaactaataagtgccagtgagggctcaacagctgatgggcagtggagtccagagtgatggtcccagcaagcgttccagcggcatctgccaaggctggaagctgttgccaggctcgagccagagcagcatgggcaggaagctcctgatgggcagtggaagtgagattggaccagcgtcagagggcggatgtactggtggcaggctcagagagggttgccttgggattcacaaagcatggcccatggtgtccagactgggggcttttgaaggcttaggctgatgttcccccttagccacacccttgctatccaaaaggtcctgctccacatctgaccgcaagcagccctctgacacagtgctggaggctctaagaatctgaagtctgcctgtcccagggaagtccctgcagcaggttctgctgtgtgtgtctgtgtccccaagacatttttcaggacagctttgggaaaagcactttttaactgttaaaaatagagagagcattgatacttgtgaagatatatgtactcactaaaatatatgcagtgagcatatattcactaaatgaacatgcattgaaagtaaacagcatgatgccaagggcttgaagttccttttcttgttgctttgtaggttaatgaggccaggggtgtggattaacagtattctggaatcacacaaaactctccaaaggaaccatttatgccaccgtgataggaactgcgtattgctcacttggatcctaagctgatttttaaattagatctttccgtgatcccttgttgagtctgtttcatgtgcattttattatattctataaatatttcactagttgtttctaataattagagaaaaagtgtctttcatcaatttaagagagaagggaatagtctgttaaggctgagcagttactgcatatgaaggctccaatggtgagcttctaccattagctggcaaaaaagagcaaaaatgcaatggaaaacagtgagggagagagagagagaaagagagagagaggagagaggcacagttactgagccatgtggccaactattaaaactaggagaaaagacacagaaaatgttgtgtgtgggggggggtgggggtaaaatgctccccctgaagagcactgaggctctagggagcccgttaaacccagataattctactagagcaggagggagctggcctgggccttcccagttagcactcactgaaaacaacgggcctctgccgagaagctaaacctgggaccccagggatggtttatctggaagattaggggagaaacgtgcaaggcagccaaggcaatccagccatctctgcagctgggaaaaggagtgattgttttcctgagytgctagcctggatttgcagaaggaaagaatgccttgtttctgtcccctgaagacgcaagctgaaaaaatgtctggctgctcttcgccgccctcccaggttctctcccacagccaagaacgactggctgctgccctgagccrggaggtcacaacgcttgtggagtaaggagctcgggtttttgtttggggctttgttttgttttcttaagtatctgcaggacaatgtttggaagagtygtatgccccataaaaggaagaaaatggtgctcttggattgtaatcagtgacttgtggttggcagttatgcctctgccttcagtactgcaggcctgtgccttccacggaccttccctaacatcatttctggagatgatggggccagctctttaagaaactattttttcacgttatcatgtggtaagaacagagatgaacctcagagatgaagagtgtgattgagctcagagaaacttcagtgacttgattttaaatgggccaaacagttggatttcttttaccttttgtgcagaaagccttcgtttagagaaaagaggactgaattctgatggacagtaggtgtgggaggggcagcatgttatcacaatagcatcgtgatgagattcctggatggagggaatcactggtgcttgcatatttggggcttcatcttagggaagttccctaaaatctctgtagcacccagttttcgtgggaagaatgtcgtgggagcaggggcttccctgaccttggaagcctggccggtcagtctcaaacgagtttactgcctccgacccaattgtgaggactgagccagagggagtgcatgtcagcctcagcctccagcagcacagcccctttctctacaagcctcagatataggggraaaaaaacaaaaacagagtcaaaagtaggtcttcattaataaaagactgggatctcccagaattaatcatcttgctcatcttttccagttctggaaatctgatctttgaacctggtatcctcagtcttagcacaatacctgggaccataatagatgctcagtaaacttggtgggaggaaaaaatcaaagaaggagtcaaaatagaggtgctcggtgccgaggagttgctaacctggaccatccaaataatgacagtctgtggcacttcagaagcattccagaaatggaacaatggcactccatgaagctgtataaactcataatgtatcctgtaactaacccagtatagaacagtaacactgtttacactgattggaaggaagaaggttcatcctggcggtttatgacattgccagaatggcttgaatccttgagggtgggtgacaggtagagtggataataaatgggcctcctggttcacagagcctgagaacctctcacccaatgggcacctggtgcccctgcagagtccagtctaagaggacaattttttttttcagatgtagtcttgttctgttgcccaggttggagtgcctgatctcagctcactgcagcctccgcctcctgggttcaagcakttccctgcctcagcctccctggtagctgagattataggtgcacgccaccacacmcggctaatttttgtatttttagtagagatgsggtttcaccatcttggccaggctggtgttgacgtcctgacctcgtgagccaccgcgcccagccaaggacaatttactctagccacagatatggccatggtcctcatgtaagctgactacaaatacagcaaatccacctttccaaagacttcattctaaagatgtaaaagaacaaaaagagataaaggaagaggatgagaagacttgagaagagtggaagtgtagaaagaaaatgtttaaggttcatcccctccccaccttggggagttcctttggcagcatcttctgaagggtacttctcctagcccaggggcagaaagatccagtctttyggggcagctgcggaagaaaggagagcagtcctgtagctcatgaagacattacgaagcacaaagaactgcacagggacagagagtctttagggtctcgagctcactctatgtccttggctgttaagttccccgagagcaaaccccagcttctcgcttgcttcaggctctgcatgtgtgagtgtgacccttgggtactctcggggcrttttcagccatgcgattctggggacttcagaggactctgttcctttctgactcgtgttccggcgtctgtggattgctcccaacaggaggaggagtattgtctattaagggaaaagatttcagtgacctggcagcagggagcgtcgtcagtgtttgactgtttatggtatgtcagggagctggttcctggcagtggcttccccaggggtggggaggggtgtgctgggggtgacaggaagcactgaatcacgacagagaagggaaagaagcccgcccgccacttccggtgttcactgagcaggtcggtggccagcgctgccttcgcatcagaaccccattttaaaacacatccaagcgcgtggcgtcatcgggacgacgggcttctccccagtagagtgtcagaccaacaccgccctgcacaaagctctgtgttccctgctttctgtcatgttcccacccatagccagaaatcccagctgctggccgtccagcccctatggagcagtgactaagggtggctgtgggactcactcacgagccttaggttgggtgtacatagtttgtggctgattaggtgttgttaaggatttactgttcagggctgttgatttctgccactggcttgtcttctcccaaggacaaggggcctgcctattggcttttagatcttagcacttagcagactctcagaagtgtttgctagaggacgttttctggggaatgtccacctgcactgatgaaaacaactcagtaacarctccactttgagaggagcagagcaggagccttccttaggtgtgcgtaaggggataccggctttaaagacgccaggctgagttgctgtgtcaggattgattctttacttctccatctggaggtgtttctgctttatcagtttctcctygtttccagctctgtctcgctgccagagggccgacgtttcctggcttttgttgtactgtggcacacagtctgttttgaaaggacaggagcataataaaagcggatatgaaagaagggccagatgacatcacatagaatactggaggaagtccgcgtttgtggatgtttataatctcagcatgttagttgtttgtaatatgataagagcacttttgatacataggaggactacaagccttgttgcttagacaggactcacgaatttttatcttaggctcatagtgacgaacagagaatggggatcttggcctggatcccaagtgaccctggctcattggttgacctcgggtacaagattcggcatagatgagccatttaaattgtgcctaagccagctactcattgaattttttaaaagaaagagagagatagaataaagaaagctaagaatttgacttattagagatgaattagcttactaaattttttccttttgaaatcttacttcagagaaattgatggtacctagaacttaacattaaatcaagtaagacccttttaaggtgaattctggaagccatatagagtcagcattatatgcatgcttactcagtgaaaatcctaaagcatgcaagtgtctccataaagagcaatctccttgaacaatracagtgttgacacctgctgttccccaggtctgtatcgtgagatggaaatacaccagcatcttcccccactaggggaagatgataaaatgcaggttaagaacatggaccatggatgctgggtacttcctgccgggagccgggcactatcctcacctcttcccgtgggttaatctcctttcatcctaacggcaaccccaggaggcaggaacagtaggttctacccattttttaaatgaggaccctgcagggcatgtgggatgagcattcctcacaagaccgcccccacgaaacatggcctggagcccgggcacccttggtccaaagcaaatcaagtttctcccaaacacagtgccattcagagcaaaccaaatctgcagcactggagacccgcacacccgactggaagcttagggcagggcaaaggcacaagacagcatcatagcactctgkagcccaggaagaacccatcttcttgcaaacactccagattaagcgtaaaaagactagaaaaatcaactgtcttcatgcactggtataggagagcagggtagagctggctcctaaaatttcacactcaggagactctaaaaatcgtgctcaaacctaaaaatgtgtgcatgctaattccaaattagccttatcgacagaggttagcgtccaaaacttggtctaacctagtccagggaacatgcaatctttgcaacttcatactgcagtgactgtgtgtgtggtctctgattgtccatcgaacacaagaattaaaatccsaacaacctagtgaggggcagagaggagtgggattgaaaatccactgttgaaatatccaggtagataatccactcccaaataacggagtgctgcctgcgcctgtccgtacccartgggtgctctcctctgctggccccaggagtaggcgtctgctgtgacttagagcagattttatgcacagaccttcttccaggcagagaaaaaactaccgagtgtgagttcacagcaaaggcatcctcgatccctgctgatgtgggaaggcataggtacacgccgtctgaaagctgccaggcgtgattcacttggcagcgtacctccaggagaaagggcggggcagaaattcagaaattctaacccagaagccaggccagcaggtaggtaaagtggctgtcgcatgggtgtggtgttgtccatggccccaaagcccctgggactttgatggtcaagtttgcaaagataaagctgcaggcacctgaggctgagcctgcccgggcagcgcagcgctgctgtgtgccaatgcaaacggggaccttccttgcctagaccagtcttcaccaaccagaacagaaatcttattgtattctgaaaaaggattcctggatctctttcattccatgcttttcagatttttttctcccaaatttagcacagagggcaggttttgaacagaactcttaaactgaaggtacttctctggaataaatagcttcaagagatggacccactttgtttattaccaacagggctaaayatttaccttagacctatatgccaatactaaccacatacacattttcattcattgccaaagaataccaagaactggcatgccgtataaataattaaaatttagtgtagataatgtgtgaggtaatgcttatattagatgatgtctcggtgaactctctccctaacgaaacagaagaaaaacaacatagctcataaatatgtaagggtatttattctaaatgtaacatgtgaaactcttcactgcatgtgtacctatgagtctgaaaactcacttctaactatgattacattgatggcctcttgaacaagagttaaaagctccttgtaacttgttcttctcaacacggagacagaacaaaatccctcaggctattaaaaggatgacatgacaaatagccttcataaaagatggtcttttatgcagccaattttcttattagttatttgacgacaacattgaggtttaaatgagtagccaatgagagaatattgaagtaggctgtttgttacagcacatctcctctaactcatacttgctgataggtaattggaacagaagagaatgatgtcagtatgagatggaagtcatgttagttcatgcgtgacatttttcccagcatggtgtttgtaccactgagtaacaggatagctgagggtaagtagaagaatacacatcagcacagcaaactgtcaaggaatggaactctatacgagaccccagggccgcagtattctctctcttgcctcgctcaggccacatactctccttagaaatgctttctccacagctcttcccaatctttggtcatcctgtccttgctctctgcagtgtagcagtctcagcacttccttacacccccttctatgaaactatgccatcacttttcttcaagataaactgttttatttactgcartatttctttacttgagaagttaacatgtccattaaactgtgctattatttgtattaggattgctaccaattttattaaggccctagttacaaagttgcatcggtattgagtggtctgccccagctctgtttttcccatggacctcggtggtttgctgtgtggttttgcagagtgtgagaatttttcagaaacagtcatatactgtgttacagcagaaaagcctgttcttaaaaagaatgagtggggactagatgtgaatcaatgtgatttgactttcttcttcccaaggtgagtggctggtgtgtttgagttggtcttgactacactgacaaggaaggtgagggtatggaggacattccaagctgaaggaacagtgtgtacaaacgcaagttctttgcgaggatggaacttcagaggtgttcatactcaatgcattgaaaatcctcacattccctcagcatgtaaaataagtgattaagcattccgctgtagttgaaagaaaaagagactttgaaagtggagggaacagtggatgcaggggagcagaaccccagtcggcgggtctcaggagaagcgaagcctgctgttcctgggaagcagtggggtgcaggaatcagaggacagcagatgctggcttcacaccctcaccttccctatgggtacagtcgaggcctcctcaaacacaccagccactcacctgggaaagaagaaagtcagactcacattgatgcacatctcgtcctcacccgttctttttaacctgatatgggctctcaactaaagggttaataccagaagcacccacctagctaagtaccgacctagacagccattagtgatttacaaaaacatgaagggtggccatctatattaggggtggagaaggasagggggcaagggaaggtggtttctggcaattggtccactgacacacccccagctgctgtgtgggacagaagtcacgtgastcagatagcaacacccaggctctcatcttgttccatctcatctgtgcctgggcatgtgtacctgtgcacagggggaccaccttctgcaaggtagctggggtgcgtgttagttctcagaatagtgccagctgtgtgtccacttcatgatgacatcaagaagatgggctttgggatcctgcccacrcccagctccggggcgctgctgatgtatctgggcaaccccagccaggatcctgggctgcctctatcaccctcacaacctgggggccaggagccagcaatgaaggccagtgagaggtgaatttggaaatgaggagctttcctggggtactgaaggaacagtatcaaaatacttgaaaagaaagagaactctttcttgtttgaggcttttggggcgttgtttcctgcgtaactcaaagccttgggaatcccagacagaaagtcatttaagattaacttttgaaatcaagtgagtaagacctgattcaaaggagaatttagccatgggttaataaatatatctaaattgcaatgaaaatcttcagcggtcttagccgttgatcccgtggtcaccatagacaatataaggagcagtgtctatggcaggagtgatggaacagatttcaggaagtaactttgagtgagagaagcaggggccccagaactctagtgaccaagacattcgaagacaggcaaggaaaccttcaaatgcaggcaactcatatttcgacggggcaccctccagtgctccgagatggaaattgcctgcatttcagtgccctgttctgtggctccagygcyctgctgtatgcccactgtgaaggctgcttgtcacctgtgctgcccagctcaacccggcccctttggtcgctgtcctgcctgcctgacggctgacgacggccccacrcccatgtctacaccctgggtgtttgctgtgtaggttccaggcttctagaccagatgactcaagatgaggcacatgtgagtctccacccagcacctaataaaaccacccaacaaatgagggctcagctcctcccggggtgaaggccagggtgctctgttgactaaggggaggccatgaaagaayggggaagactggctctggacagagcctcatcccctgcgcttatcgtggctcactgccaagtgcgaacacctgggtccacgcctccgcatgccgggcccgtgtgcacacctgccttcctcgctggtgagagggcgcatctcagcctgcttttcgcctctagaaaggcactgagtgtgaactgtgaagaagtggccagggcagaggatgtgtgtcaggaaatgccaagccccctttcctcactcagccagatggcctacctgtcctcacctgaaaccaggcccacccatgctctgagatcatctctagcccaggacaaggcatttccaaggcagcgttgscttagactatgttggctgggcttcamctctcattcatgtgtcaggagctctaggccggggagccaggcattggwgaccctttagctgggaaggctcggggggctgagttacatcaccaaaccctcacagcagccctgtgcaagggtgccatcatcctccctttgtgcagaagatgctgtggcttcaaaggaccagtcacttctctgcctgaactcttgccctttgctacatcattcatgttcccagttggcccctcacacctgctcttcagcatccyrggttctcagcagttcctacctggggccctgcctgccatccctccactgtcattcagcctgctttaaatgtctcaggatgactaatgtcactgggatgtgttctggccctggcctttggcccaccacacactgcatgccctggcagtcaaattcctgaattttttctggagccagtcctgcccgtcaggacccaagctccagcactaaagtacggctgtcagaggtggccctgccaatagcacactgtgtgtggaaaacacccagacattgagctgcctgaggagaaatggaaggtggcccacttggccggtcattgctcrttaaaatgtawaggtgtgcagatatgaaaacacggggcttgttgccgatgactcaggggagggcaccgaacgtcatgcctcctggttatgtcttgccgccgtgttgaaccaggatggggaatgatcccattcctcaggtattcgtctgggagaccgtaaaggattgcttccagacaggaaggacgtctgtcttcctaaagagtgtctagcccaactcgttgaactactgtcatttctttctggttctcctgttccaaatacacagcctgagctcctccctccttctctgagtctctcagttccatgaggacaggcatcgacgcagtcataactgctggcactcactggcaytccagaaaagcccatggggcttattcattgtacgtgggggagcgcccctgtccttcaggcatttcaccatcttgagctggtgactagttcaagaccattctgtagagtgaacacatttatttaggatgcccttgaagtactgttaaacaaaggaagctgaattggctggctttgctgcccggcatatagaagaaggatttgtgctgggtggtrcaactgtgacctgcacttcctcttccatataccttgccctgctaataccatgttggaattatttccttaatttctaaagctgcatgtgcggaaatggcttatatttcctgttttgataaactaatagaactttactgagaaccttgttcccgagttggctttcttctcttttggcctcttttttgattaaaatagtaattctaaaagtccagcttgactggacttgtgtcaaagacaaagaattgtatagatttttttttttgccttgaaaagataactttttagctttcaaaaggatgataactttttaacaataggtaatgttgatctygtttgtcacttggcgtaggtttttcagtattcctctgtggagggaatttgggttagatgctaggcacaatccaatcgtcagctatctgtaaattcccttcagaggatggctcttgttggctggaggtaaattggcttaaaaagacttccttggacaagaagtttcttggaacatgtagaggacaaaatattctttgttttgggacagatgagttttgttcttgcgattcatataactcgattactgctcattttctatgtgcaagttgagaacaatgaccagcattttttttcattcgtctacatggcatccactttaaatgatactcatgtctgaagagggctgggtgcatttccatggtttgttcccttgctatatgttgacaatttgcagtggtagtagagaaatagtagtctcaaagagtttaaattgtttatgtgttttgtttcctggcattcaggttgtcatttaaacctatttttttagtgtcctaaatataaggaccaatctgccatggagagaagtgacattgggcagttttctccacgttttgagatgggcgattcctcagacatctaccaaggaggacacccttttccccggtggcaaaggagggactctccctctgcctggtggcacaggatcctagtgaaggcaacacgatactctcttctcactgtcattgggtcactcacagaagagccagggcagcaaccaggaggaccggatgtcctcttaatcctgcagctgccactcttgatctctgctccaactccactgtatcccattgataaatgacagagtctctgctggcagccaggcagctagtgactccaagcaagaaattctgcatttgatcctgataggagcctggttcaagaaactagaacctggttttccttaaagggttccatgacttttattcttccagaggtaaaagactcaccaaggaatctagattgtgcatctggagtgatttgatgtctatggtaaatctatccatgcaaacagatggattttcatatcttcttttttttttttattgagacacagtctcactccgtcacccaggctggagtgcagtagcacagtcgtggctcactaaaacctccacttctcgggttgaagtgattcttgtgtctcaacctcgtgagtagttggtattacaagcgtgagccaccatgtccagctaatttttacattcttagtagagacagggtttcaccatgttggccaggctggtcttgaactcctaacttcaagtgatccaccgcytaggcctcccaaagtgctaggcttacaggcgtgagccaccacacccagcccaatttccacatctttctaaatgtaatgatgccaagatttaaataagactccaaggaaaagaatttccatatatgaagtcaaccaagaaatccctcactcaaagattcccgttctgcacctggaaaaaatgtctgttgcattccaattgagtagaatgtaatctaaggtttctggaaaacacatcttatgcctttacatacactgccaactggctcctaaacatttccaattcctacagttttgaattggcacagcaatgctggctaccagtttcagaacaggaaaaagaagagctctagaaggatattttgaattttaaaaaaattaaaagagagaactacaattttttttagcacttggagggattagaggctcagccactgagtccttagggctcagagccgccccagatgcagcacaggtcacagaggtcaaagcaaggtccaagggccatcacttttctaggacagacatgccaggcacccactgagtcatggaacatgctgaacctgtaataactcctaccttctgttgcacccagggtgatggttcagtggtttccagctttctcactatctctaaacaaagcctgttttcacaatgcccatccgaccacctagtgtagggctttgcaaacctcggtgtgctaacctggaagtcatgctagaaagcaggttctgctccaagaaaggtggggtggggcctgcattcctcactagctccagggtgatgctgatgggccctgtccacacagcacacttgccatggcgggggccagctgggagagcagctgcccttcagacaagcactcatgacctctttgactttgtgtctaagtccctgcctctgatcagttttcctctctgtttccctcttattccctcccattttatttgtggtacaacttccaggtaaatcttcctcaaactctctgtccagtgtcttctttgctacctgctctctctcttgtttctttctttctttatttttattttttctttttgagatagggtcttgctctgttgcccaggctggagtacagtggcgtaatctcggctcactgcaacctccacctcccgggctcaagccatcttcccaccccagccctccaagcagctgggaccacaggcgtgcaccaccacacccagctattttttttgtttgtttgtttgtttgtttgtttgttcgtttgttttgtacagacagggttttgctttgttacccaggctggtcttgaacccctgagctcaagcgatctgcctgcctgggtctcccaaagtgctgggattacaggcatgagcccccgcacccagccttctctcctgcttctttgctgcctgtggctttctctaccctgctcctcccttgccggcgtgggttttgtccctaagaactggtgcaagaatgaccggtccttcatctcttccttgcagctcagagactttcaagtctaccttgcttcttaggtttatgctgctttggacacttatttcctaaaatgtataattcacatttatttttcagaactattccttttggttccacaacactaaagatgtcaagagcttacaataatcagacttagcaccccttccctttgtccacagtgcctctgccagcttctttaattcctctgcctttcttgaaggagcagataagtccaatggggtctggcctccaggttggtgtgtgatgagatagttggcaaggtrggactgcctgcaggtcctcagtaaatgttcattcatttgctgagggaagtaatgattcatccccctaggcaaactccttccatgatttggaatttaggtctgaagtttcctggccaatgcgcctgggaagccactgagctggctgtcagctgagtagggactaaggatgttcaactgtgggtactgaaaagcggcactagattgaaatggagtcctgagctgcaagttggggagcacagcagtgttggagcatcctgaaagtcataggaagaatgggcttcgagtcactccaactcaggatgttcctgattccctgataatgatcatgatgatgatgatgatgacgatgatgatggcatgaaggtggtgccctcctaggcctggaggttaggggtagccagtctgtctctgctttctagcagtgagagcctcaggctgtcaggcagggaggttggccttgggaggtaggcatagaaggaatagtggagcatagcagagccctagggcgcaggcctgaacacagccagtcctctctgtgaacaggataatgcaatacttaaggacccactgttcctaatttgctctctaaccatcctcttcttcgcagctcttaccagaatttaaattatgtgggtttagttgtttgtttacttatttcaccttcttgtctacttggtcacctgccacagggcaggagcaatgtctaatctgccccctactctatacccagagcccagcacagtgcatggctcagaggaaattcacatcagtgatcatgagtgaatgaatttgtaaagtgaaagcgtggatgaaggacctcccagccccttgccctttgtcatgttagtttggaattggggatgtgaggtgtcctctcactggtgcagttgaaggaaggtgccggatacggttcagattcctcggtggtcccgagttccctgggtggggaggttctgtgtgcctatgaggaggtgagagtcaggcattctccagggagtagggtgcccccaccagctttcacaggccttctgtaaaactggtcccgccaggccttgagtcctttcctgccttggggtgaaggacacccagacaaccacaggagtttggccagccgggctgaacggctacagcacgccccacgagcctggatcacgttccacacctgcagtaggagctgcaggaacctcctggccctgcgagcttcagtggggtcagcagccaggcacacctgcagggggcgtcagtgagagctgggcattggaattgccctacacagttgctgccttggaaattcagacttgaaatgagaaattaatggaggattgaattgatgtttctttcatgagcctgtgattgytgtaaaaagaggtgtgtcaaatgcttggtgagacccatgcaggattctttaaagaacactgaggcaaaccagaccttatagggaaaaacaggcctsacggagactgaagttaaaatatggaccagggccagtgtttcttcatgaagggggtgagcagagatttgaggaggctgcagggtgggaggaaactcatcatttttattaaggagttgacaagaataggatcgcggcttgtctttgatttgcgttaagcagkaaaatgaagggataggctggagggctgagagcagggtggcagcaggtgcgtgcagtcggtatgcctctgctggagggagtggccaggccacagacatgggacaccacatagcagtcctcacactcctcctctgaggtcctcagggaggcatttgtgtctcgagactgtttcagagrcccatgtcttctcaggagatgccaasgctcaggtcagagacttgttgagtttttaagagactgtctgaagcacacaccctgccctaataagtcaatatttctgttcctcctggagacctcacattccaaagtgtggtacttcgggctcttgtaaatgttggaattcctaagastctctctggaggacaggtaagatgtcagtgggaacacacatacacacatgcacgtgcgtgtgtgcacgcacggctggcatgtccatggaaactgccttggcgtggaatgagcagggctgcctctcaatgaggtattccttccctcacaatatagcactggagccatcggtacatgtagaaaagtgttactgggaggtatcttaatcagcctacaagtcctagttccaaaagtaagaatgcatcattcatttttgagtgggttatgaataactcactacaactaaatacagtgaatatcgtaaacctagaataaggagtctgttagatcaatttgaaaccattcaaatcatttcaacctttgatttatatggagggatttggcaagtggctttaaaatcaaaattaaaaatagcttgggaaacagcagatggaggatatgagttgatgctttaccctatagacccaggaggcccgcctgcccttcccagacaactggccaatgaattattgggtcaactgaggacctctgccaagcgcctgttcatgcctccctcacgtgtagtaaaaggcatgaatgcgccagcccatctagtcttgagctttggtgctaaactttctggcttagtatggagttggatttctagaaatcacatattcaaatcatgggatttatgagccccattgcagataaacattggagccattgaaaaattggcaaatacctaggatcgtgttttcagggcgtgagaggattttatatatgtttacttttacaccataaactccagctgcctcattacctcactcaagacaaaaagatcactggaaagaaatgtaaaagctttcaaggtactgttttctctgaagggtttgggactttccactttttggagttttttttttttatagtagtaactgatgcatcagatactatattaggtaaagaattataagaagaacataaaaaacgtgaaactctcagatgagagttctctagtagaaaattgttagctgaaagaaaaaaaaaatcacccatacaaaaggaacatggagtcattgctggaacccaaggccaactcttgccaggaggttttgggtcagaagcctgcgtgtcctgcccttctgccctggactatctggaagaccctgctgggcggcagtggcagagtgggcctggccatgccacttgcacctccacgtggacatgcagctggtgacaggaaaggggaaggttccagcagacccgctatcacaaaacaacttacagagggagtccccaagtgatagtcctgtttagtcattgacacgtaactcagaagagagtgaaaaggctgtggtaaaatacaatttgcttaacattggaaagggttctgtcatctggtaagttttacttgcatgataaggtttcaatcagtgaacaccagaagccagccttgtccagggtcccttaggtgtaactgtgtgataatagggaggctccaggcaggctggcagaggctggctgagggtgaaaagctagattaagattcacctgtgagccactgctcacctgtttgtgtggggagggctgcagtagctcaactgtgtgtgggagagggctgcactagctcacctgtgtgtgtgggggagggctgcactagctcacctgtgtggggggagggctgcactagctcacctgtgtgtgtgggggagggctgtactagctcacctgtgtgtgtgggggagggctgcactagctcacctgtgtgtgtgggggagggctgcactagctcacctgtgtgtgtgggggagggctgcactagctcacctgtgtgtgtgggggagggctgtactagctcacctgtgtggggggagggcagtaccagctcacctgtgtgtgtgggggagggctgcactagctcacctgtgtgtgtgggggagggctgcagtagctcacctgtgtgtgggggtggagggctgtacagctcacctgtgtgagtggggagggctgcactagctcacctgtgtgtgtgggggagggctgcactagctcacctgtgtgtgggggtggagggctgtacagctcacctgtgtgagtggggagggctgcactagctcacctgtgtgtgggggggagggctgtactagctcacctgtgtgggggctgagggctgcactaggtcacctgtatagggcggagggcagcactggctcacctgtrgaatgaaggttgtactagctyacctgtcaggggagaggaggcctgcgctgagactcggctgatcagaaaggggagaaaagagggtcactctgattgccatcatctcaaaaygtttaatactgtcacgatttgaaaggaagagctaaggtacttgtccagtagcccaatctccaagtccatctttgatctgaatgttgagatcaaggatgagaaacacctttttgccccatcgggattgcccatccagggaactccctccatttcccactgactcacttaaggttgtatctccttctctgatgaaacactcaatggggtcacccacttgcctgaataggtcctgaggaaagcctcttcccggcattcctcctccttactgagcataagtgtgtccygtagggcgaaggggaaagaaagtggacttcctctgccgacacccctcaaatgaagtcgcaagtgatatcggtggtgcagatgagggtttggcatcccgccagatgcacctgccagtccctcctcctcacatggccctccctttgatcaccatgatgggtgtcccatgagggagccaccgtttgcaccgacacctcctcctcccctccgtggtggcccactcctgcccacctctctgggttccccgccagcattttctccaggcacatgctccacatgtccaggcagaaggcagagctgctgcccatgccccggagtttctcatgcatgccacaggcctgctccttcctgattcctcacttcacatggaatccagattcttggaatgttctcctgacgctgaaggtccaggactttgcttggcatcgggcagtttataggcactttttttttttttttgagacagtcttactctgtggcccaggctggagtgcagtgatgtgatctcagctcactgcaacctccacctcccggttcaagcgattttcctgcctcagcctcctaagtagctgggaataccggtgcctgccaccacgcctggctaatttttgtatttttagtagagacggggtttcaccatgttggccaggatggtcttgatctcctgaccttgtgatccacctgcctcggcctcccaaagtgctgggattccaggcgtgagcgaccgcgcccagcctagtgagaactatttaaagactccttgaccatagaacatacagcaccaagggtgaaccctggtctcaactgtggactctggtgatggtgatgcgggcagactcagcgattgtaaccagcatacaggttggttccaacctgtacatcctggtgcaggatgtcgatggtgggggatttcaggggtgggagagacaggggtatattggaaatctctggaccttacactcgattttactgtgcaccaaaaactgctctaaaaattagtctatttttttaaaaaagccttattgaatgttttgaatgaatcgtttctagagttggaaggattctcaacagatgatattttaatacatgttgtagttggcaatgtttaggtaacttttctttgccttgtgttttattgttgcagggtgtgaagaagtttgatgtgccgtgtggaggaagagattgcagtgggggctgccagtgctaccctgagaaaggtggacgtgtaagtcacagcattgcaataaataatattatcttcctcatacagtcatgcctcgcttaacaacggggtaccttctgggacacgtgtggctgggcagtttcatcattgcttgaacatactggagagtactcacacaaacctagatggccgggcctactacacacccggctgtgtgataragcctgttgctactaggctacaaacctgtacgtaggcagttgcgacacagtactatttgtatatctaaatacagaaaaggtacagtaaaaagaaagtaaaaagatgtaaaatgggactcctgtgtagggcatttaccatgaacggagcttgcgggacttggaagttgctctgtctgcgttggggagtgcrgggtgcgtggatgtgaaggcctggggcgtgaccgcgcaccactgtagatccatcaacactgggtcttaggcggccctaaacttacgttttcaatatttttmtttcttcagtaataaattaaccttagtttactataacttttttactttataaactgttaaactttttaaactttttgactgtttttgcaataacacttagcttaaaacacacattgtacagctgtacaaacatattttctttttctacgtttttattcgatgtttttttctattaaaaaaatttttttttactttttaaacttttttgttaaaaacaaagaaacaaacagacatgggagcytgggcctacacgggctcaggataatcaatatcactgtctttcacctccacatcttgtcccaccagaaggtcttcggggcaataacacgcatggagccgtcatccccyctgggaacaatgcctgcttctggattcttcctgaagcacctgcctgaggctattttacagttaacatatgtacacatataaataggagtacactccaaaataacaataaaaagtagagtatagtaaatgcagaaaacagtgacgcagttgcttgtcaccaagtgtcatacactgcatgtaactgcatgtccacactttgatgcaaccagcaacacagcaggtttgtccccaccagcaccaccacaaacatgtgggttatgcgctgggcagatccggtgtcatcttagggcaccactatcttcagtgcagtctgttgttgaccaaaaagtcatgatgcggtgcctgattgtacttccatttgaaatgagagtgtcttaaattttctgagtaagtcattgcatactttgctaagaaatttaatcaattgtattctgttccactagaacaaacaataatataatgcaaaattgggtcaatgtataccactttcctacaaaattgagagcaattttaattttcataagcatcttttctttcattcattgttcattataagtacgtacgtgtgtttgcatgtgtgtatatatgtgcatatataaagcaatgatgttttatagttataataagcagaaatgtcataaaaatattctgtaaagaaaaaagtagttgcattcatactgcaatatagttatacaaactagggagcactggcagttgtatcattgctaacaattctcactttgaaaatatttactccctgaatgtctttgatgtggtccgtctgatagataagtaagaggaaaaaagggtaccccaaatcatcaccattacatctggcagaatttgaaatattgccctgatattggatttaatatgttcaatcaaagtgattgatctctgattctgttgcctttaaaactgatatctttaaaactgagtcttggtgttacttggtttaaaagtattatttatatgtgcacctttaagtccatcttgcatgtgtgaaggtgtggggagtagtattttgttttatgacacagcctccttgcctttattccctggactcatgyatctaccctaggacacatgcttgtctacaccttcgtttggcaaatgccaggttgtcaaggcaactggaaactcttccctgaattgccctgatgttgttggaatcagaaattataacagcccttgggtgtccaaatgagtttccccaagttgaatcctgaagtcagtttctaccgtagccatttcccatccctacctgccaggaagaacgaccctctgctggagcttggcctccagggctgaggtgcgatgcygctgcctcctctcctgtgtcccctccacaaaatcaaatgggcacagttcgtgatagggaacctctttataaatactgtcttcctatttcctgacctgtgactgatcattatttcactgtcaaaaatcacaactgaggaggcttcctgcccctttgatcaaagctcccatctctccacctgctgcattcatcattagttgcacttctyaaaacagttatttttgtttcggttaagcattcctctgcctgctgtggggactttatggtttagaaattgctggttgaagatcatttatcagcacttaacaaggctaaataatttttaagtttatggaagccatttcacaagatgtaaaattcccctgggtctcatgctatggattttcccaacgacacttctgtggcagtgatgagaatgcctgactgcagactctccaccccgcagcccttgactggctcagccttatatgggcatggatagaattggtggtatacacatatctgtgagactagctgtgtgggacggagttcgtgtctagagcgactctgcattcttctccatgtcatcagataaacagaacccaaacaaactgagtagaggtgaccggatctgttcttttcactttctatgattatttaatgcagaatcaacatagtaacattttccataatgcctttaggagaatttgattcttcagtaaacatagctagttcagattatttcagtatataatggcatctgcatagcagtgtactgttacacgatgccagaggtcttttcagtgaggttattaggaggggatttctaaggatccccargactctgtgatttcaygaattcacagcacaggcattgagacctttttatttcccagcgtccctagtgaaggaaacaccttgagtctctttctatactttgccaagtaaaatgaaaaatcgacaccttctggttaatctgattaacttgagtaatccaaaactccgtgtgggcttggctgtcctctagttatccagacgggttatcaacactgatccaattaagctgtgattggcagctgtctgaagggttgtacaaaagacagaggcaaacgatacccgccccccaccccggggcctggactgtgggatccactgtgcacgcgcagcactcatgtggcctgaaatmtggctgtacctgtacctctgggtgctgcgtgatgcttgacactgtcatttcacctgggccgaggcccgtgctgccaagggaccacacagccagtcactggagtgtgttaacaatcagcacacagggctgctctgttaattcaggtgagaccctgaacattcactgataaagtgatagaaatagctgatgataaaaggtaagaaagagatcagtgatgccatttaccattttcttattcctggagatattcttctgtgtgttacaggagacaattactctcaggactgctgcatctactgtattaaaacatttttaagatagagcatctgtttcaatactacaaatccggtgcatgtggcttaactatttattaattaacagattttcccaaatgtgctcttgcagaagcattgctctgtctgccctacttttggactgatagtatttttttaaagtaagataatacataaaaatagcagctggacagagcttgctgtcgaaagggctgtgtgcatagtttgttctttcccacagcttcccctggggtggctcccgtctctcttccctgtggtgctactgtaacagccctggaaatgcctggctgcagactcgccacacccyagcacttggctagctcagccttttatgggcatggtaccccagttcatctgtgcgtcaccatggtgacagccaacatcggaagttgtacgtcactggataacttttggacacgaagcagaaatcacaagcatactatggattccagttccaaatggattctcatgtgaccagtgaatgagctttgggtcaatttgcagagctttgttcatccttgggcggtgagtggtagactctcccagcagggagagaattgcttcacccagacagaaccacccagtcccatagataattccagcaagccacagagttgaggcctgaagaggcaaggcaggagctgtgtmccggctgcttggcactgcccacttcccctccctgggcagagctgggaggagctgagccaggagccagcccatgtcctgtagttcacgtacgagcacactgacttcaggagggaaatggcctctgcaaatctcacacccagattgtggcagagtccaaaacaaaactcaagtctggggacttagacaaattctttttccagcataatcatcttctgtgtccgtactcctcttcccatatgtcagcctagaagagtgaggctctccgggrtgcagggaagaacataggcagcgtgagaagagagtttcccctcgttatgcaagagttatggttccctagttaactctctaaccacctcttcagttgttttgtggattaaaaaataactttaacaaatgattcagggctctgttgttatttgagggtctgtatttcaaataatctctagtaagcatattggaataattataaatgataagttcgattcattgatactgcatgttctcagatttacccctccactgaataccaggcaatcatcagcaccaaacarggtgcccgcccctagcacctttcactgcagccctcccaggctcaagcagttctcctgccttaggccctcaagtagctggaactataggcatgcaccaccacacctggctratttttgtatttttttttttttgtggagatgggattttgccatattgcccagtctggtcttgaactcctaagctcaggcagtctgcccacctcagcctcccaaacttctgggattacaggtgtgagccaccacacccagccttctttttctattctcttttcagttttctttctttatacaccatggagatggaaggcagttgaatgggaagcatcaaagtgagtttcagttacagaatttctgtcagagttatcagcaccacgcaatgtaaaggttaataatatagaaagcagtagaggggcagataggaaatcggagtcaacaaataagacagctttgctttgcttgttaactcacctagcagatggtgaaagtcttggatttttccaagtaaggtcaattttagttcattatttcagtaacttagccaggttcctgttctcccccaaacatctgatttttgaccataaactctgatcagataggttgtttcaaattttttaatkacatcaaccttcacagggcacctcctatgtcctaaggcacttgggtattccagaaactggtaaatatgaagactggttggataactccgtgttgggaattagtgagatggtcaaatggccctgtcacacgacaacagggaaaagagaacccacgtcatcagcccctgaacgagtgagtggaggcctctgcatcactcagcatgcatccaggcggtacccacagtgccccctgtggcctggcagctgcagctgagagcctggagactatgcttctggaaggttgcgattgacaagytcgctcaagtaagcagtggctgagtgcttagggcaacaagttgtgtttagcgactgcattttttcatgtagctaagagtttcccacagtctatgggtccctggacttgggtcaaatagtccttagcctcaccagatttcttaaattcaacamtataaatcaaagtaaaagaaaccagagagaaactgagcaaaaatagctgccaagagaagagggaacgagtgctcggggcgggttggaggcagataaygagaaggcaagaaaattctttgtctttggctcctgctgtcagctcagaggggtcatcttgagatgaaaaagaaaagtccccagccttggggaaggaaaggagagggtgccccacgcagatatgaagcaaagccattggcaagatattctctctaaggagagcagcggtcttgccaaaggcatcttctattgtgtattgccgtcataaaccctacccttccatgtagatagccaggattttaaaatamaactaaatcttccccaaggagagaattgygatgccctggcagcatgggcacttttgtgtgggtgtttccgtggctagaggggttctgaaatttttgtatttgtagtagagatggggtttcaccatgttggccaggctggtctcgaacttctgacctcaggtgagccgcccgcctcggcctcccaaagtgctgagattataggcgtgagccactgcacccggcctctgtcttagttctttgaagatgtgggcatgtgtggaataaaaacatcagtgctgctggtcggacctctttgcaaaccaactgcaatttttccagacagatacttttaaacggtgtgcccagcatacttagaaaaagaaatctccagctttttacatgctgcacagaaagggcaaggaattagtcagaaatagcaaaaacaccacctggcttccaggcttttatagccctgtctacacatagctctcactcactttcaaaaccatgcagttatttttagtgtggctttggagcaaaggtggtctggctcatccagcgctgcaggggctgtggcaactgggtcccgtgattattttctgtgggtgagctccaaactggcccattatctatcaaatcctcaatggtgttatagtggttcttttgacataaaatatttatcatatgggtgggatggcgagtggaggaggggccagaaattcgtaattgcttctctctttgtcagctgcataattaactcaattctaccacaatttattaaamgtcccacttcaagagaatggttaaatctcgctggaaagaaagagccacattatgctctgaagctccaagtttcagaaaatattctttttgtgaatatataagcccaataggtcacccatcttggtcttactttcatgaaaccctgactttatattgtgctttcttttcatctaggatttactatctagaatagtcttacacatttgctatgagtttcctgtctctccactctccccagatcctccctctacccctggctccaaactcaacggagattggatgttcagtatggtaactgctaggcacatgcagctatttcaatttcagttttaattaattaaaatgaaataaaatttaaaattcagttatcctgttcactagccacacctgaagtactcgcatagccacaactccagaagatgactgctctgtttacttctgtattcctggggcctatgcagggcctgacacatggtggatatatactaagtatttgttgaatgaatacatattgtttttaaattttagtagccaactgtggctatgcataatccactgcctgtgttaggggccaagtttcctgtttttcaaggcattttctctcttgcttttttttttcgaggcggagtttcgctcttgttgcctgggctggaccgcagtggcgccacctcgggtcactgcaacctccacctcctgggttcaagtcattctcctgcctcagcctcccgagtagctgggattacaggcatgcgccaccacaccctgctaattttgtatttttagtagagatggggtttctccatgttggccaggatggtctcgaactcctgacctcaggtgattcacctgcctcggcctcccaaagtgctgggattacaggtgtgagccactgttcccrgcctggcattttctttaattagaactagatgtctcattgaatggcgcaccaaagtatgaacctcgagactttgtcacaaagggctctgtgaccttgggtagggcacatgacttctttaaaggagtctcctgagggcttcacaccttgctcaaatgggccttccagagctttgcacacccctccccctacccttctctctgaacctgccctttctccacgcaatgsccttggctctccaagagtcaccctggccccattgcagcccctgctgctggggcatcctccccrgttcattgactccttccttctcttacaccagtgccttacatgcagttgctgatagaaaatacatatttgagcgttgaaggaatgtaaaackccattgctaaaacgaagctagggcctttcttaggatggaggacatgaaagaaaatgccacttccaaagctcmacactccatcagattgacaagttagctgggatcagataataatagccatttcatgtcttgattaaaaacctcacacagactccacagaactgttgataaactagagcaaaaggaattcacagttccattcttcttataaaccaaactaaaatgctgactttcgaaatccttttttccgacctcctgatggaaagttttgacaagtgtagcactgaagcatttccccctctctgctagaggagaaatggcaatcttcaaagaccattgttttgttttattcgcttccaattcattcttagtaaacaattgcaggatttctaaaaagaccagaccatagtagttaccagacatgagatgctttctaaaagctactttgaatagaaatgttttctctgaatctgtcttccctcatgcagcaggaagaatgtctraagctatgctaccttcatatagaaacagcgtccacagtcagtcttcccagttgggtttatctsagcggtcctttagaggtggtctrcacaagactctaaatgttcctgcctgtgagcggtcttctactagactacttcaataataaagagaaaactactagattgttttgcaaagttttgaaattactgttgttgttttcttctggagacagtaaaataatagccaaggggagaaaatggcasaaatgatcaaaccaagcaaccgtatgcacattttcctccctgaggggcctttgaatttgccacctaaatgctgcatgcagtgggtaccccaggaaggaggaaatggggtcccttcatctctgctttattttgtccatcattaaatcagaaggacatggttagtgtccttcatcytcgaagggtgaagatggctgcatacattgtctgttactatcattgacattagggtaaacatataataaatgtatttttaaatgaaacagtcatttcaaaatgtccttaggaagctggtcaacctgaggccctgagctgcctgcacttctgagccctctggcatctcacccaaatgagttcattgtggtgtagacmactgaagcgctcaaggtgtcagaggtctgactcacctgggaagcacaaagcaggccttccaaaggccatatgtccccactgattagaaagatcaaaacacccctgtccctttcctctctgtgtccagcctagaggtttgcattctaggagaatggcagcagccagacacctcccaggaacccrmtgtaagccctgtatcgatggcagcttcctgcgaagccactgtgagygtgtgaaaaatccccaccgtaggaacaaaagtttttgtatctaaaacactgttggggtgrataactcttagaggtttggaaccagaaataaagaaaaagaacaaaataaaatggaagtaattaatgttgggtaaataatatctttggcctaacaagttcttggctccattgtcagcatccgtgttttctattaaattgttgtctttgtgaggcattattacagttcttccctcttaaagtctgttttgaataaagaaaccgaaggttggatgaattctrtagttaggttggtctctctctaatgaagattaaagttctggcatgtcttagctctgcatggcaataattacttttaaraaaatgcacttagggtggtgattatggcaytgtaaaagtcttatgaaaatgagatgtatgtcaagagaaccttactatcaaaatcagttttgtgcattgcacccatgcttmgcatctgtcagcaaaagcaggctttctcaggtttggtgaaaggaatattgccgtggcctttgaggactgatgagtttccactaatttagagcaaaattaacagaatcctatgagcctggaggaagcagttcacttttgtttgtgttgcttttagcatactgctcatttcaaccctgcttagagaagtggcagatcttataccctcaggcagctgggatatgccagccacagagggcaagatccataatctttaacagattttactgtacacgttcacagccccaaccggccataccattgcaacctaaaagaaagagaggattgaataagcagtccagaaaattcaagcaaaactctgaaacaggaagccaggcttcctgcacttgaaggccttggggtaaattcctcatcatttaacacctgaaattttgcaaatatttggacttctcttcgaagaatgatagaattattggtctagaacatcgactagtcttctcccagccccgtattcaggaaggacagaagaatgcattggagactgatgaatatccactctgttctaaggactccagggagagaaattggatagactttactggtaacttaaggaaagacaaaaaggcgtaggtttatatatatccagagtaaaattcacaaaggcctcaagtcattaaaggtattacatactattgcaaaagaaaataatccaactcccaaaagttgaactaagaaagttcctcttcttccaaataaggttttacttagagactttcagtcccacttaaaacttcaaagcaataagcttcatttcacagcttcactaaatgaaacctaatggtagacatgcctttgactagacataaagtaagcattctttctagagaaaataaatagaaagagargtttctttctatttccttatcagcttcacctctttcttagaaatgattgctcgtctggacagcatttgtcatgagtttgttttcactttaaagcatgaaggggagagatgaccagggagtgatacccatctgctcatcttcaaggattgcgtaggagttgagctgtagaggtttcactgcagaaagccagtattgtcaagaakcatcctgagaacatgtaattaatctctacaaatggtagaatagttacattagtgccataatttgttatatttaagctatttttctaattcacaatcaactaaggccaaagaaaaggggggggggggtttgagctcaataatagcattaggatgtttaatgtgaaatccaagaagactaaaataatacaattaggccaggcgcggtggctcgcacctgtaatcccagcactttgggaggccgaggagggcggatcacgaggtcaagagatggagaccatcctggccaacatggtgaaaccaggtctctactaaaaatacaaaacaatttagctgggcgtggtggcacgccacctgtagtcccagctacttgagaggttgaggcaggagaatcacttgaactcgggagttggaggttgcagtgagccgagatcacaccactgcactccagcctggtaatagagcgagactctgtctcagtaaataaataaataaataaataaataaagcaattagagttacagtatggctattcaggttgaccattcgtaatccaaaaatccaaaatctgaagggctccaaaatcagaacccttttgagcaccgacctggcactcaaaggtcatctcgttggagcattttggatttcagatttttcagtttagggttgctcaaccagtaagtacgtgcagatatttgaaaattcaaaaaactcccaaatccaaaacacttctggtcccaagcatgtcagataaggagcactcaccctctgatgagcttcaatcattgtgagacctttaaaatctaacaccattaatagagagcactattaacactatggacaagtggttcttccagccagaatgcccatcggtagcactcaacaggtggcactatggcataggctatggttaataaaactgcaacaaaggaaaattttagctttaacacgtgccgacttctctgcagcaatcccacccttcccgcctcagcttacaaatacgcactaactcagatacctcaatgatactcaggtgactccagccagcctcaccccaaagctccccatygcacagatgagccttctctcccatcatccacccaccagccccctgtccagccccactttcttcaattcattgatcgcagcacagcatagggaagaacatgatttattgaatcttttccatcctaaagtattaattatcaatagctgcaatataccctgacttcataggaaaacctgcacctcattctaatcaccttgttctgagcgtctcactttccttcttaggtcttgaccttaagatttcaactttactttctagccgctgcctgatcaacgtggagtgaagtgaaatgatttccccctgtatttggaagctgtacttctaaaactctgtcctagaatcacatcactctcttttaccaaccagattattgcattgcattggctcactagtaatgtatttctaccaaaaaaaagaaaaaaaaaacaagggttttttttacttttgacaagttttttgttttgttttgttttgttttgttttttgagacaaagtctcactctgtctcccaggctggagtgcaatgtagcaatctcgactcaatgcaacctccgtctcccgggttcaagcaattctcctgcctcagcctcccgagtagctgggagcccgccaccatgtccagctaattttttgtatttttagtagaaacggggtttcactgtgttggccaggctggtcttgaactcctgacctcgtggtccgcccaccttggcctcccaaagtgctgggattacaggtgtgagccaccgtgcacagctttgtattttgttgttgttgttgtgttgttgttgtttttctgcttcttcactcttggatttccacttgtgcagttaatttttgaacttgattcaggattttgttttgattcctgttaaattgtggaaaggtgcagctacagttgctgatgtggagatggagaaattgaaggtgttcttctgcccttgattttcctctctcyctctctcctacttgtctaatactgatctaattcagacatagacagtccatgaagatggctattgaccaaagaggagatttctaaatgctaattcctactagtatttttgggactttattttgaggatagcatggatgaaaagggatagctatgcagccatctgcataccctcaagttgaataatcagactgaggaagttaacaaaaagaactttgtgggtggaaatgaactccttaattccagaagattaaaaagacttctttagtagaaggaaataaagtttaacaaaaagggtgcccttcaaaaatgtcagttatcttggaaggaaagatgagtaatggaaatcccggttgatcacaaagatgaataagatgcgtcctttaaaactggcatttatggaggacaagggttcttcaccagcactctgcatcctttcctagcagccgctgacatagtaagagaagcctctggaattatcttattgcatagaattagttattaattattcctacaattaagatacttatgatacaacaaagaagctcaggatcttaaagtgtacatgatgtgcgttgtatgtgtgtgtgcatgtacctagacctatttacatttatgttctgaaattgtatacatcttatatttaccaagtatttatatattttctgtatgcgtgtatttccaggggaataacaatgtactatcctagaaaatcttttcaacctccagtgctcaacataggattttagttatttttagcacttaatcttatctgagaacttaaaatgaaacccagtgtgtgtttttttaatgtcctgcaactttattagaagacactgttgctttttaaaatttatcatgtttttatatcaagcctgtgccagatgttcctaagtgttttgaacaatagctggttttgaaaccatcaggcgctctccacgtagctctgctgtgagcatcgatactccctgctctctgagcatagtgtagggcgggcggcgggccgtctgggatatgggaaagcctggggcctgggcgctgcaaagactgttctgcctggggtctgacgttggccgtgccgggagctcattgtctttccgtctcccccagttcttatcctactgatctctatatgctgttggctttgagacaataggaactccagaaatgaacagacagggaattggctcatggaggggaaaggaggcaggagtgggtggacaaggccggaaccacatttgcaccctgaggagctgggagattccgctcaccyctctctctctctgtaagaatgctacatcccactcagggggyttccaattgtccttactctagttggcaggaacttaaaacataactgaagcatgaacaactgggtattttgatgaatgattgacaacatcccattgtcttcagagcccagcacaccgggccggtcattccactgttgaggtggttccttgagagagggggcagaggaccctgtgcgggggtgggatcaagcacaaagagaaaactttcccaaaacccttcaacagacttttttgtttaagaaaataataatgtttccgtctctgaacaccaagtcaggtgacccgtttttccttcatgtgatttgtgagctatttcagaacctcgtaagtctctctgacaggtcaggaatggggaaatgagaagtgtcatcctgtagagtttctcttctctggaatttgtcttgtgttattttttaataaaaataatcagtgttatgctattgtttcaaatctggagacattttactctttgtgtatcattgcctttcttttttaatgtgtgttatttctggaaggcaggcaagcttttttcttgtttgtaaagatctcttctcctgttgccragagagataacctgaaaagacagaaaattgccaacttaaactgtagatatcattccattgatttatttacagagctttaaatcttattttgtggccactacagtgaagcaaatattattttaaaagcttcatatgaaataatcrttagtagcttgttccattttaaaaattgcaggtgtttcctatgcctttgggcaggttttgttgtttgtcttttgtttgtgtgtctaaatttcccattgtctgggatgtgcacactgcatgtcatggaaggtcattgttctggttcacatgattttatttccaaactgtggtataggttctaatgtatgttggctgctgtgtagctgtgtacccatttcttactagccatgtggtttagtgactaaacagtttatttctttatacataatatttctctgagttgggatgtctgttacctgttttcacagtttaaaaggaagcataatgatttagttgtaagttttttctgccagcactatgaatcatttggggtgtctgatccacttgaatagcacatgtgggctgcagaatattcatattgatggaacaacccaaactttaggatttccattctacctgccacccaaccagtaccaactgtgttgtgaacgcattttttaggtagggaaatgatttacaaatgttagccttctttaccttcacagagttgatatttaattggaccattagtagcaagtacaaatcttaagaacgttttaaatcttgccttcagagggcatctatggtagagggctttgggtagtgaaatatttgactacttttcttaaaaaagcaaaaatcagaacaacttatagaacagtcctcctgatgtgatcagctaaaaagaaatttgaagcagccattagacttaggtaaaacttaggatttaagcaaaaagctgctctctcctgtcctcatgtgtggcttattcacactcaggggtgtctcctgtgttgaataaagtggcctccagctacagccactgcttacacatgcttggttgtgcacatgagagataaatacccaagccgcagggtgtgaggacgtagaaatccagggcatccctaaaattatatcaaactctgccaaactgcctgagaatctatgacatcctaatgcctccgtcctccagcatctgtggagttggctcctttccgcctctgtgttttccttatcccttgttgagtgtaagttaatcgggcacatgccaaggggcagcatccgttttctttttacccccttttggatgctaaggctcttcaaggatataatgcagccctgtgcagccgtggccagtttttgcacggccgcagtagagacttggcaccctggaatatctccaccaattatccagcttgagagttttcaactgaactgaagttttattaatgttcatcataatcgtgtcacgtccaattttagtacttggtatgaattagagraaaaaggagaaaacgatggcccgttgggtcagcatgcattgtcatgatacccagcattgattgacagcttacggtggtcccggggcgatgggagcactttacatccattcacacttcctccttagggcagctccgtgatgtaacccacttttacaaggaggaaattaattgaagaacaatgatgtgagctgcccaaaatcacatcattagagagttaaggaaccaaactctgacccgagatctggagccaacacttaactttccctgaggggcatcctttaaaatctgggtatratgwtgcaccttgaaactcagttgttcaaaattattctttctttctcaacctttaacttccacatcaactctttctctccctaaacaaaatcactaaaccaaagaagcaaaagtctataaggccacagttttgtgaattaaatatccatccttttccccatctgtttgcgtttatcctactctctttcctcttttggaagcagctctgttccaggaactggcaaatcgatttggctctttttgctttcctctttgctcacagggaatctcctctttgaaaaccagaaaggttctccaaatatagcaaatgctttcctcatctccatccatcctagttacccctctcctcctctcctcccactctcctgctctgtcccactgctccacccctgactctgctaacctcatgccgattatacttctgtagtttcattaagtggatagttttcccctcttcagaagcattcctgagtcaagaacaccctgaatgcactggaagttgttcaagtcttaccctctaagtcaaggtgagatactgtgtagatctgccaattaatctccttagaggattatttaatcctaaaagaaattcttatagctcctggttttaagccctttctttactggggcccttttactttagtccttatctactccaataaggcacatagaagacattcctcactataagatgtgtggggttagagctgttgcccaattggactctgagatgcgatacttctcgccattcaggtgtgaggatggctcaccgggtaagcatcttgactttggcatcacattccagcccttacacctctgtcccagcccctgggtgagccatgttcccctttgccgtcgaattctgcctctgaaaatggaatcatagttactgcctccagcagctccaatgtggcgatggtattgagagatcagcgcagtgcctgtcacagtgcagaggctcaacagatggtggatactaccacgttttctctttctgtggaacttccgcaacagtcatccgcaaaatgacagaaaatgccagtcagttgggcattgcagggactgttgggtttgtgggcgagcatccctgcaaatagggctcccattaaagtctcataaaggaggtattttggaccttgagtctttttaaatttttgacagagccggtgcagtgtctcatacctgtaatcccggcactttgggagaccaaggtgggcagatcacttgtggtcaggagttcgagaccagcctagccaacatggcgaaacctcttctcgactgaaaatacaaaaattagcttagtgttgtgacgcacacctgtaatcccaactatttgggagctgaaggcaggagaatcacttgaacccgggagtcggaggctgcagtgagccaagatcacgccgctgcactccagcctggatgacagagtgagactctgtctcaaaaaaaaaaaaattgacagagaaaatcatcgtgattatgctacatctttatacaggagtggtccgtacaagtttttattcatttaatttttcttctgtgctgcagaagcatttcctgggcttttgacattccctgagtaaattaaggctttgtcagcctctgttctgatttgggtgatttatacatcattatgcagagtaagcaccagtagaatcacagtgtctatttcagctgaacaaaatttttgctaaggaaagaactatctgacattcactggcttagggatatttggggagacacgatagcttgcagtgcagagtggcctcctgcttgttcatgacagtacgaaatgcattcctaaatctcttatgtatcacttctgatctgactgagaagaactaggtaaggtataagtaaggaaatagtctcttatctccacccgcttcactgttcctggcagagcaacagtctggaactgtgagcgtcagaaggtcggagcctgtttttattgcagtgactcttctggttgctgcttgatatcacatgagcctctgacctgcttaactacattttaatcatcctgccttgatttgtattcttggtagatgaattgtgattcattattccataatcattagcccccccacccaaaaaaaaatcactatttttctgatagttttgatggttttagcaaatttttatattagttttggaaactttacttttttataaaaatcatcgtttttacattacatatttgtttcatgttgcaaattatcggaaggaatgcctctcacgctrtaatgtgcctgcaagcagcctgggccccttggtaaagcacagatgctagttctgcaggcccaggagggcctgaagttctgcagttgyctcaagctccccagtgacatggtagctgctggcccaggggccctacttgtaattcaaggcccccgaggaccttcctgaaacccccttggagagtcgaggccaggccgagtgcagcctcaggtgttctcctgagactgacgcatcctgcttgccttggtgaggccaggttattaagcagatagataattcawtgtgtgcctagaagacatatcctaaaagttatctttcttgctgagatatggaactagacctgtcttcactcagtgatcgttgatctttagaatggccagtgtggttcatcttattaaggggaaaactttaattttacttattacgttgaatgtcactatgttcagttattgattatcccaccagcttagacttgggtggtgagtgtcttatacacctgaaagctagggtgggggtggggagacttgcttataccaccatgccagctgtagcattctgctcatggtcaccagagtgcattgtcagatgtttcttggttaggacatctgcattctccatgcaacaggtgccatctctgcccttgcttggggtcagagtgctttaatccagatgcagtattggttgcatctgtcattatcggctcatctgcagctgtccttcctgtgtggtgagcctacccctcactcctgcctggtcactctcctgaccctccagtttactttctggctctggaggtgcactgagcaagggcacacactctccctgtatccatctccatcccaggaccccgcacatccctgcagctgctcctgggtgtgcccaccccacccccactgggatttgagctcccctcaactaatgggctttccatggggaatcaggagggtrggaattgtgattccattaaaatcatttgactcaggaaaagcttttcgaaataatccccaaggaccaactctttacagaaactcctcccccgccttcatatttttggctttgactatggggaaattcattatgttgagctaaccttggtgaaacaatactaaaaatagagataatagaaaaacatgttaaagaaggtaaaatcatctgaatacgtactttataaaattcagcctaatacttaatggctttattcagacctaatttgaacatatcacaagtatatttcaacagaactttcttcttcacagaacttttctggaaaaaaaagtwtactgtcaaaatgtttctcttattagcaatcaaaayccagtttggaaaagtgagtggtttgctctgaaaaacaacaaacagggcttgtgggaattcaacagaagaataacccacggcttgtaagaatattaaaaccacggtcacattttacacagttttggcaaaaggaatagcccaggcgtctcgaatcgagatgtaatgtgaaatgaagaatttcaacagggctcattaggcttttgttctatctgagcagagttttctgctttcttggctaaaataagatgcatgcagctttaattgtatctccctttattcaaggtcttcrctggcaaccttaagtatcaaggatttgctgctcaaatcatttgtaaataaaactcagatgtaaggaaatacagacaagggaggacaaaagttttgtccaaaaaaatagatatggaacaaattcagagaattgtagatataggaaggacctgatacactagcaagtctcctttcccagttgaggaaactgaggccctccatggtccagaggtgcgcctgcggcctcatgagacagaaccaggccctttcctccgggtccctcrcctcaggagattctctgagatggagaaagattctggaattacagccaaatcaggaggccttttaagattgatttaggaagagctaagagaaaatactaaatggagttgtttccaagaaacagaaataatcagtgaaatttcttttacaaggaaataattgaagcaaatgccctctgcatgaaaagtcgcattaaaacccaccccagtgggcacttcctgaatgcagtattccctgcagacagcatttgaacsatacttaggaagcaaacccttcgaaccactgggaagaatgttcccagtctgacctagacagtccttagacaaggaattcggtcccgcrgtgtatttccttctccacaatgtgatcatggtggagagctccacattggtgtcggtggacacagtcatgaatggaagctgcttcatatgaggcagagcctccgtgtcccacctcacgcactctccggctcctgtaaaggggagatcatggagccgggggcatttgggccccrtttgtagtcttgcctggccctgacccatcagcacctgcctagttccgcaggcacggagaagactgcaccttctgctcttaggtggctgcaccagggcttcttgaaaaggggcagcttcctctcagggacatcagacaaaatctgaaggcacttttggttgtcatactgtggagagggtgtttctggcatctggtggggcacagggacgctgctacacatcctatatgcacaggacagccccgtgaagaagaattatctggtgcagattatctgaagtgctgaaggtgggagaccctgggctagagcagtgctcagcaccctaagctaagaggcgagtacgcgtgcaggtgcacccgagggaaagccttgccctcagaaagcccctgcaaaattccttggcgtgaccttccatcttgcagctcatttctttcatgtactcagcaaatacctgagttcctactgtgtgtcaggctctgtgtatacctcaaattgaggagccaggggcgccgggcagcagtggggctcacagacttttggctgcagcagaagctgcaaggctcctcccttctcatgcacccccaaatccaactctggaggtgccgtgtcaggcgggtgcacagaccatggagctggggtgctggggtcggagtactccccatggacccccattcggaagtgcgggctgctgggcacattagttaatctcttggcaccaccgtgttttatctctaaaatggcagtgttgatgagccccccactccctaggtggctatgcctgtgcacccctaacacatgagagccacgttaggatggtgtctgggtcccttgtcattatttgggaggtgcagctgagcttcctggtagaaggacttacttagcaacccgctccgccttggaaagctgaccctcctccacctgcctcctctcctccaccttctccagcccctctgtgtcaccaggcagctctctcccgtgtcccagtgagccctccgcaggccagccttcccttgcaatggcctgtgttgccagctagtcctgttctgagaggatctgctccactcaaaccgtccccacaccttccatgtttgagcaaagcatctgtggattgcagatgaaaagaaacttcaccaaagagcacattagtcatggcctcaacccagctgggagtgatttgcatttgataacagctttttaacccccaggagcctcttaagaggtgggtcttgaaggaagtcttctgagaggcttttcttctgaggggagggtcgaacagagaattttatttagacttttctcccaccagcatggacatgagttatcagtattgtttatgattttatagaggagattttcacaagaggaacttttcctgtgcctttgcctaatgcatagtaactataagtcacttgtttatacagctttaatgtgttaactgttaaaatttaaatattaatattttaaataagtctctatttgtataygtgctgactcatcggattctcacactcacttagagataagatggttttctatgcacacactcacattagaagaatgtagggattttttccatcaatattcgggcaagagggcactaggaggctcatcgaacacccacagggctctacgtcacacccacaagctctatctcacacccacgggctctatttcacacccatgagctctatgtcacacccacaagctctatctcacacccacgtgctctatctcatacccacgtgctctgtctcacacccatgggctctgtgtcacacccacgggctctatgtcacacccatgggctctaactcacacccacgtgctctatctcacaaccacagagctctatctcacacccacgggctctgtctcacacccacgagctctatgtcacacccacatgctctatctcacaaccacaggctctatctcacacccatgggctctatctcacacccacgggctctatgtcacacccacaggctctatgtcacaaccacaggctctatctcacacccacgggctctgtctcacacctacgggctctgtctcacacccacgggctctatctcacacccatgggtctctatctcacacccacgggctctatgtcacaaccagaggctctatctcacacccatgggctctatctcacatccacgggctctatctcacatcctcggtctctatctcatacccacaggttctatctcacacccatggactctgtctcacacccatgggctctatctcacacccacggactctatctcacgcccaccggctctatgtcacacccaccggctctatctcacacccacggggctctcacgcccagcactctggcgtccyctttccttgacatccgcctgctcctctaccgtagccagatttctttaggaaaaaaatgattctttaaaaatctaaaatactgtaaatcctattgggaaataacagttattaaacctmttcatcaggagccaccagatatcaacttaggctgtgcatctttctgccaggtgggtccttatgaccctattagtgactgtctcgcacaactggagataccagtgaacacgtgattgaactctcagcctcaaggacaggtcagaaaaggagcctcaggtcaacaatgtgttctcgacctgcttgaatttgcatctgggaatcctcctgttagtagaaaggttgaccctggacgcagtctgggattgaatctgcctcactcctttttcactccctttcagaaacaaatgaaaggaagtgtgtaaaccacacagccaagcacccaacgcatcatcatcttcatatcatcgttattattagtctaaaatggtggtggtgatgataaccccactccctaggtctcagtacccatactgagattttatgctctccctttttctgctggatttcattttttctctagaagcttgatgctatgccttgattattacttatttcaatgggacaaatttgcactagaactacagtatttgttatcactgaatttttcacggttgccatatatatatccagcatcatttgtgtcctactgctgttgaacaactactttaagatcagaaaatagaagtagtttagccagtctaaaaggatttccattcatcgaatcataaatagagaaaaaaacaatcccttctatccattactaaacctctccattccaaaygtcttcaaacaaagcaattatggtggacaagtatttgaggacagttttttctcataaacagctgcatagtgctatagcatccttgttgattagccaattagaataaattctttccacagcacattttaaaagacttaggggaaaaaacaagacttgcaagacttgaagttttcatagaacaatgtgcacccgtcttccgcccacttccccagagagaaatatatgaatcacatagcagtaaatgagtaaagtatcaaaacaggtgctggagactagggagcatgaatcatcttcttccttagatactttgtaaataaaacaggatgtatttatggtaactctgtgcgtaaacttctatttacaatgaattatataaaataaatacaatgtcacacaaagtaaataaaattgaagaatctattaaatatcactttaacaattatattaaattgtttccttaaattgatccaattttgaaagaggaatttgaataggagagatcaacaacaacaaaaattcctcctgtattcaaactttaaggaacgctagctatctattttaatgagtgaataacttatttcccaaaccacattttaagaaagtcaaaaatagttgcatcacatttttcctattgaaaatatacactttgaataacagaaaaataatccgcagataattttttaaagatttttactcagcttagtggtaatagatttctgtttatattaaccttaagaaagagtgttcagaatggagtttggccatttcattatgagttatggatattattgtataaaacatgtacacaaaattccactgatgattttatctaatttcaaccataagattctgacagagaatcaactcaactagctcttttaagcatcacttttaatgtaccacattttttaagtgactcttgtttatttttttaatgtttrctcaaacttatggggatagtgccatgttctgcgtatccacgctaggatgtggcctttttgagccatggaagaygctgtcagaacagggtccggaaaaaacaaataggacactcgttattttcttgttgatttgattagccatatgtaccatttacaatactcttgggggacaaaaggaagagagggaaaaaacaattgtatctgaatattgcaagctaatcttttataaattttaccctttaagggttgatggattcagaaattaatcaactgtatttttatctgataaatgctaatactgtactgcagtgcagttgtggttttgagagttacattcataggtttatgtcagatcaagaatagattttgttggggggtgatttttagattgtaggaggttttatacacataataaaccaagatgctaacaggaggatgcaatcagtggttattttgtgtcagcccttttctttttttttttttttttttttttttttctgagacagtctcgctctgtcacccaggtttgagtgcagtgscacgatctcagctcactgcaacctctacctcccgggttcaagcgattctcgtgcctcagcctcctgagtagctgggattacaggcgcatgccaccacaccaaactaattatatttttagtagagatgagtttcagcctgttggctaggctggtctcgaacgcctggtctcaagctatctgaccacctcggcctcccgaagtgttgacattacaggcatgagccactgcgcctggctgtgtcagcccttttcaagctgcagcaacactcacactgatgcacttggccactgagaggtgagccattggcagatgatgtacagaggatggaagaaggactgctgtgcaggcggtaaatggcatctgccagactgcacagatgaaggttcctaccctgttcactgccgcatacaggaaatatgatcaaaagagtggtagtgtgtttagacttgtggctcactctgtgtgagaaggaaaattaaataccaaagccatctataaagtagcaaaattgccctaaaagctgcaaattaggtcgtaatcatacatcaatgacagagaagtacatggaagacctggaaggatattctagaaatagctaccatcttgatggttcatctcttcttaattacttaagggaatttcgacaccttattaaaacagaggaagtccaaggtgaactctaaaaccctccttaagtatccaattctatgattcggtgtgaagcattatcacacttgtcccaagggaacttaaccagtaatttcaacgcttcagtggggagtcacacgtcagatggactcttgcgggccatgctctcaggtagtggcttgagtccccctgctcctccaacaaggccaccgtccagctattaatattactcccaattccctggacttgctatgtcctctggcgtgtggagtgcctggctgccgccttcattctctatctgactgtctcctgctcatgctcaaagcccacacccaatgtcaccttctgggggacgctggtcccaaacacctgccttcccaagccaagtcacagctgagccctgtgtccttagcaccctccaaagccactgtcttccctctccatcccccagtggactgcgagcttctggaggatgctccttccctggcatagagcagacatgtagcagcacttagtgaggaaggctgaggcaagctctgtggtccagtttccctgcaaataggggtttagaaggagctgagaaaagaggagatgagggtacactgtagggaagaagtgwtattcacaactgacagcaaggaacaaaaaagttaaacasaggccgggcgcggtggctcacgcctgtaatcctagcactttgggaggctgaggcaggcggatcacgaggtcaggagatcgagaccgtcttggctaacacggtaaaacactgtctactaaaaatagaaaaaattagccaggcgcagtggcgggtgcctgtagtcccagccacttgggaggctgaggcagaagaatggcgtgaatccgggaggtggagcttgcagtgagccaagatcacaccactgcactccagcctgggcaacagagtgagactccgtctgaaaaaaaaaaaaagttaaacacaaaaaccacagtatgaactaaaagggcttagaaatctgaggctgttcccatgaagaaaatcctcatcctggacttctgtgtctgctaagggaggcacagtgattatgatagttggaggttacagtgtgtggataggccgtggttacagtgtgtggataggccgtggttacagtgtgtggataggccgtggttacagtgtgtggatagaccgtggttacagtgtgtggataggccgtggttacagtgcgtggataggccgtggttacagtgcgtggatagaccgtggttacagtgcgtggataggccgtggttacagtgcgtggataggctgtggttacagtgtgtggatagactgtggttacagtgcgtggatagaccgtggttacagtgtgtggataggccgtggttacagtgcgtggatagactgtggttacagtgtctggatagaccgtggttacagtgtgtggataggccgtggttgcagtgtgtggataggccgtggttgcagtgtgtggataggccgtggttacagtgtgtggataggccgtggttacagcgtgtggatagaccgtggttacagcgtgtggataggctgtggttacagcgtgtggataggccgtggttacagcgtgtggataggccgtggttacagcgtgtggataggccatggttacagcgtgtggataggccgtggttacagcgtgtcgatgggccgtggtcacagcgtgtggatgggccgtggtcacagcgtgtggatgggccgtggtcacagcgtgtggataggccgtggttacagtgcgtggataggccgtggttacagtgcgtggataggccgtggttacagtgcgtggatagaccgtggttacagtgcgtggatagaccgtggttacagtgcgtggatagaccgtggttacagtgtgtggataggccgtggttacagtgtgtggataggccgtggttacagtgcgtggatagaccgtggttacagtgtgtggatagaccgtggctgcagtgtgtggataggccgtggttgcagtgtgtggataggccgtggctgcagtgtgtggataggccgtggctgcagtgtgtggatagaccgtggctgcagtgtgtggataggccgtggttacagtgtgtggataggccgtggttacagtgtgtggataggccgtggttacagtgcgtggatagaccgtggttacagtgtgtggatagaccgtggctgcagtgtgtggataggccgtggttacagtgtgtggataggccgtggttgcagtgtgtggataggccgtggctgcagtgtgtggatagaccgtggctgcagtgtgtggatagaccgtggttacagtgtgtggataggccgtggctgcagtgtgtggataggccgtggctgcagtgtgtggatagaccgtggctgcagtgtgtggatagaccgtggctgcagtgtgtggataggccgtggttacagcgtgtggatagaccgtggttacagtgcctggataggccgtggttacagtgtgtggataggccgtggttacagtgtgtggatagaccgtggttacagcgtgtggataggccgtggttacagcgtgtggataggccgtggttacagcgtgtggataggccgtggttacagcgtgtggatnnnnnnnnnnnnnnnnnnnnctggtcccaaacacctgccttcccaagccaagtcacagctgagccctgtgtccttagcaccctccaaagccactgtcttccctctccatcccccagtggactgcgagcttctggaggatgctccttccctggcatagagcagacatgtagcagcacttagtgaggaaggctgaggcaagctctgtggtccagtttccctgcaaataggggtttagaaggagctgagaaaagaggagatgagggtacactgtagggaagaagtgatattcacaactgacagcaaggaacaaaaaagttaaacagaggccgggcgcggtggctcacgcctgtaatcctagcactttgggaggctgaggcaggcggatcacgaggtcaggagatcgagaccgtcttggctaacacggtaaaacactgtctactaaaaatagaaaaaattagccaggcgcagtggcgggtgcctgtagtcccagccacttgggaggctgaggcagaagaatggcgtgaatccgggaggtggagcttgcagtgagccaagatcacaccactgcactccagcctgggcaacagagtgagactccgtctgaaaaaaaaaaaaagttaaacacaaaaaccacagtatgaactaaaagggcttagaaatctgaggctgttcccatgaagaaaatcctcatcctggacttctgtgtctgctaagggaggcacagtgattatgatagttggaggttacagtgtgtggatagactgtggttacagtgcctggatagaccgtggctgcagtgtgtggataggccgtggttacagtgtgtggatagaccgtggctgcagtgtgtggataggctgtggctgcagtgtgtggatagaccgtggctgcagtgtgtggataggctgtggttacagtgtgtggttacagtgtgtggatggaccgtggttacagtgtgtggataggccgtggttacagtgtgtggataggccgtggctacagtgtgtggatgggccgtggttacagtgtgtggatgggccgtggttacagtgtgtggatggaccgtggttacagtgtgtggatgggccgtggctacagtgtgtggatggaccgtggctacagtgtgtggatgggccgtggctacagtgtgtggatgggccgtggttacagtgtgtggatgggccgtggctacagtgtgtggatgggccgtggttacagcgtgtggatgggccgtggttacagtgtgtggatagaccgtggttacgttttgtggataaagcatggttacagtgtttagataaaccatggttacagcatgtggataggccatggctacagcatatggatagactgtggttgcagttatgggtagaccgtggttacattgtgtgactagattgtcgttgcagttgcggatacactggttaaagtgtgtagagtgttgagaaacgctaagtagctttcagcctccctgactgcaccgagcaacctttggtgtaaaaaatcctccaaggttttcggacacatgctcaagttacagaacaaaacaactgcaggattcactttgtaagaagagagactcaggtgtgtttcttgtgtaagccacagtgctggaaaagtaggatggctcctggggatcaccaaccccactccaatctcagccatcrtttctagccatgcaattgggtgtatcccttagtatctttgatccctccttgtctgtaaaaaatggaaatgaaaatactcataggttttatgtggagtttataaggcaactagtgcaccatatggagtggagaagtgctattgctattataattgtgtaatagtatgtaatacattgatatgtaatatattaatatgcaattataataataatagcattgttattatttctccactttggcccacaaacctgaattcagccacttctrtgtagagagtactcagataaaaaagaaaagtgagatgcttacgctctagaagaccatgatgtgggacagagacggaagcatgggatcttctactgattgtgaaaggacgtgcgaaacccaggctgctggccatccccatgaagggctgctagaagggtctactgaaaatggcccacagttgggtgctaaatgaggaaacattatccagaaaactcacttaaatggagcgactgaggccgggcacggtggctcatacctgtaatcccattactttgggaggccgaggygggtgaattacgaggtcaggagttcaagaccagcctggccaacatggtgaaaccccgtctctactaaaaatacaaaaagttagctggccgtggtggcgggcgcctgttatcccagctactcaggaggctaaggcaagagaatcatttgaacccgggaggtggaggttgcagtgagccgaaatcgcaccactgcactccagcccaggagacagagttagactccatctcaaataagtaataataataaaaaaaaggagcgactgatacccacatataccaggtgcattagcacaatcactatttccaaaggctggaaggaaatagccttgccgagggccagaccctgagctgctggaggccttgagaatggcatctcacgtccccacggagagaattgtgatgcccggacatcacgggcgcttccatstgggtgtttccgtggccagagggattctgaaatgtgtagggacaaggacccattccagggaagccaagtgtcggccgcattcaccacccgtcccctgcagtctcacacctgcccgaggaggcagcccagcagtcgggggccccgagctggggaggaacgcaggcrgctgcagccccgagggagccctgcgcttgtttctaagaataggtggcttccgggatctggagttcggtttttctaaatacacctcagcccggagactcggaggcaggcaatggggccaagtaggcagccttgggagtgacatcacggtttcctcttttaaggcgattctgaggcttccttctccccaggcccctcccgcccagctgctgcagctgctcrgagccacctcggcctccacctctgcggagctctgacctgccctggcttggctgtgcctgggtttgggacagttcggtgtgtgttaaagaagcagagctttaactgcgttgagggtgtgttttccctcctgyctgctcttcttacctgcagtccaaacacgtgtgcctcggttgtttctaaagcttccccgtggactgcatgactgaaaatggactaaatgatgattatgttaagaagacttgacagtgccacctttagagggaaacgccaaaagtggcccagaaggctgagggacaggggcctatgtaagcttcacgggaacagaattcctaagctgtaaggtaacatttctatgcaatatgaaacctgagaacaaggcttaataacagcccctccaggacggcggcaagcgagccctcaagcgcagtctgcatttccccagccgcagccaggcagctgccggcaccttgggaggcactgggagcacgctggtgacttctcttggccagtagrtgtgggcgtggctcggtgctccagacactacttgaaaagggaaggtttctgggactcctggcaccgcggcctctcctctgcccaaatttcaagatttatttttactcgttgaacgamaaagagaatgagccctgtactctgtcatgctccaaactgctgccccatttttagaccacagagcaagatgaatgctgttggaaggaatgtgtttatgagagagacagtttttaatccatmagagagcaatacttgcgactttaaatatggcatatggtgaaaaagtgtccctgtgatgagtcagcaaaaaaaattatttcacccctcacatatacgagggtttgattagctcactgattgcagttttactagtgtgcagcacagactcaaatttaaatatagcttgagggaaaactctgacatcagaatttgtgcatgataaactgtgttgctcaaacttcaaaggtctggtctccactgcttccgggacctccccctgcctcccaggggacagattcctcgtgtgatcccacaggccagctgcttcaaagctgtgtctttccttgggccccttctgacccattggctcccctgtctccactcctcacggtctgccctcaccctctgtgatcatggctgtggccctgcgatctccatcctgtctccttgtgacagattttccacctcaccctttctttaagcagctgacactcagacccatccttcctttgtgtctgatgtctttggttgggtttataaaggcaagacacttctcccaacccatgcaggacgtcctcacagatcagcttcttcaaggagacctagcccagcccgtgaatgagtggtggcagygctggcagcatgagaacaggagttgaaacctgctctcaccccggccaaagatcacatcgcttccctttcctataaagtagtgcatcatgtggaggacatttcgtgtctgtaaagtaccatcacccttttctataaagtagtgcatcatgtggaggacatttcgtatctgtaaagcaccatcacccttctccctaatctgtgcatgtgtgtatctgtagaagtgtgcgtgtgcgagaatccacccttcatgatttaattgaaatcacagagcagtgatcagcagcagcgaagatgaccctcacagctggggagcccatgcttgatgtggtcagcattgcctccctgcakgagggcccggctcagggagtccttctcagacccctctgtcttccctatggtctattaatctccccatgcaagggaagatgatggacatcaaatcgactgtaggctgtgctcctctgtgcrctctcacgagcactaacacctcccagcatgattctccaggactgcggctccaagaggaaagctggccccagaagcaggctgctgttcagggcctccttgcctggtccagtccttgcttaggtgaactccagctgaccaagataagcattcactgcatttggtttaagcagcctttcgtgtttattgtgttagtgggtgcttttctttctaaagcaaaaaaaaaaaaaagtttaaaaatttttaaaactaccctacttcttttatgacttttactcccttctcaaaaatatcagtgtttcctaagttcgataatagcatttgaccaagtatagtacacacttgatgaaattaactcagttttattaaatgcctattttattggcatgggatgatttaagatgaagactctcagtgttaacggcctcaattcatttattcaaaaagcatgtattgagcctgctctgggtgccagctactatgctaggtgcaaggatgtaaatattcgtaagacacaatcaccccactcaggattttttgctgtctacttttattgtcctgtgaagaggaaagtttggagagacccactcccctccaaagtgggtttctaggtcatgtcccatcacaggaggaccagggctcttgagctcgttgggaattccaggaagacttccatggaaggtggctggagtctctgtctccacagattcccaaaggtcacgcagtgaccctgcacagggagccttgaaacctttgcagttggagccagagggactccacacaccttctagcccagcgctgggagtctgtgggtgggaccccgagtggtgatgtgttgcactcaaygccatgccatgggtgaggagcagaacctggtccacactcactctggtaaactgacaccccattaaaccatgttttaaaacttgtgtattgggaacttcactgaactcagcagtagttattccatagggcagctggaaaccattctttagggactggaaagtccattctcatgccctttgacttccttgatgttaattctaaatgacacattctcaggatgttttccccagaggaatcctatatggcagggctgtgtacaggcctgagaagcgacagggcagcctgcggttacacttgactgagtaatccgcttgtttagggctgtggccgatgagtccctgttcccatggtatcctaaacgtttgcagttattaccaaatctgaattcaaccctcatcttttatattgaaattccttttttaaaaagacatatgtcaagtggaagctatttcatttgtatctgacactatcttttcaaactgtttatccaatcatttgggtcccaagtgaattacgaattcatcaacttaaggaagaaacttggaggttaagacttctttttacgatactccctcattcatgaaaaaatgcgtttatttttagtagtgctttggattctgtgttttgtttgttctttggttttgtttctagaagagtcttgttggaagctctgtttccagaatgctggattggctgtggtggggtccataacccactgcctgtatcaaactcatacttcaagaaaatattaaatagttgcagtatctacagggcctctacagagccccttctgctattagcagggatgtgactttaggtcacaaaagaactagaagcaaaatggtgactatcagaaaaccttacccaataggagtagccagacttggtcatttgtgaggagtccggcagccggggttccagcatctctgttgcttccctgctgttgccagtgtaaatgttttatcatagtcaggatctgttgagttaaaagaatatccagagatataacaatgcattctttgtctgagtcattaagaatgtttatgaagaagaaattgagtagtgaaaagcacagattcagagcccggcagatcttcctctgaaaattggctctaccgcttactagcgcgatgcccttgagtaattctctaatctctgtaagcctcagtgtttagttctgcaaaacagaagagcaacacctttctttcagggtcgtcattgggattcgaggtagacaaagtaatctttagtatctagtcacatgatcattggtccccaggtgctcgctaaaaggcagcctccacccgtcctgagagtgaaccactgcattcttcagtgttcccggctggcaggtgtggactgctggttctcttcagtttgctctgaaaatctcactttgctttgcccttgctggatatttacccaggtttcttgggctctttctgcccccacgtgtcttgcacatcccagcaggtgtctcctctggggccttctctcctcttggccccacacattctgtttgctcccagggtggatttggaggggagtggtaacaaagacccaagttttcaacaacaaatggcaggaggtgaagaacttcaaatttgagattctaggaaaaaagaggagtttgaaagaaatactgaaatactgaaagtcacggttgaatatggtgagaacttaagagtaaaataaagaatcatcaagaaaacaagtcagtcagtcaacaacttgactgatttaaaagaaccaatatgaagagtctaaagaactgatttattcttgcattcacgttccaaagcaatttaagtaaactcaaagaatgatgctatagttgaaacgtaaatggaggaggactgggtatttatctccaagatgcagggagaaaggtgggttttgaagaggaggaagccaggacagaatacccgaagtctgcaggaaccaggagctgggaccctcgagggcagtgggaggagagacggtcacagcagtgctgtgagtccgcggggctcttccggcccctctgcctgtgtgtccactcagtatgtgaaaaatgcctgtgaattgttcacccaaaaatgtattgtgcagcagcagatgtcccctaccccatgcagaaaaaaagaccatattagtacaacgcctgtctcattcctgtttcctcaggggatgcctgagaatcccttgctttaaaatcctctcccgacccttatctaactgtggtcaagaataattgttggccatttcctgctctggaaaccatctggtctgctgtggtgccctctatcctccctcctctttaactataaattaagtcckaaaagaaagaagtagaagarctgagacaatttaggaccaagaaagtaaagttaagaaataattgtattaagtctgtaagtttagaaagggctgatagccatggggcaggtggttgattttcatcctcaccatgtagagaataagaagggaaaaacttacatggaggattctgactagcctggagcgagaactcacagtgattcagcaaatatccacacgaacagctgcgaagtattgttgatctccccctggtgtcgcccacctgggaggattggcccacggtggtgctgaaggcaacagtatggaggttggcttcaaatcccttctggcagtgtaaattcatgagaaatgctgaatacagttcatctcatgtgcttttcttttgtaaggtaaaattgagctctttcttttctctaacaagctcattttaaaggctatttaagggaaacataaaattaaaatataaaactgaacctttcgctggctcaatttcttaatgctaaattgctctcccatccaagaataatttcaaaagtttggaatttataaatggcaatacttggatgtggaaattatgttaggactcctatttttatgaatacaatccagtataatgtaaggctatataaaatgaaatatttctgttgaaatgtatttcaattctttgtctgagtagtgaggattttattattggattttagttactcaagtttcagctatatttagtgctgaaattctaggccattttaagagaatcccactataaagagggaaaaaaaaaaaaggccaggcccggtggctcacacctgtaatcccaccatttttggaggccaaggtggatggatcacttgaggtcaggagttcgagaccaacctggccaacatggtgaaaccccaactctactaaaaatataaaaaatagacgggcgtggtggcacacacctataatcccggctactcaggaggcggaagcaagagaatcacttgaatctgggaggcagaggttacagggagccgagatcgcaccactgcactccagcctgggcaagggagtgagatgctgtcaaaaaaaaaattcttttttacatgactcagatacaatgagggtcaaagtatctttgcccaaaacattactgtaggactcatagtaaaaaccttccagcagaatgaggtgttggccataccccctgccactatatgatgactttctccaccatatctgtgtgctgaagagtcagatgggacagtagaagcatgagagaaaatccatgctggaaccacctgtgcttgactttgtaaaaaatttttctcacaggtctttaggttaaggatcttttaactcccttgataatttggcaaataggtattttataatcgtaaaacaagagaaaacattgatgtagtgcttactttgtgccagacactgttttgctctgtgtgtgcgtgtgtgtgtctgtgtgtaattaactcacttattactattttccccctttaacatgaggagcagagaggctcagtagtttgccacttgtccactgtttctaacctggttaggctggtcagcatttgaacatggaggataggacagtcacatgacattcgcacaagtagagagaggaacgttgacttctgagtcacaggtcttctcctggtagcgccatcataccttggggatgtttcacagccacaaatccaaacatgcgtcccagactgcatgacccgtaccccagttgtgttgacctatgttcatttcctaactcgtgcaattacacaaggatggtcttggtgcacacgacctctcggtccattttctggccaatattcagttccttgttctcgccttgccatttgccacgcttcagtcagtcttgtttcccacactgctgctggagaggtgggctcctccgcgggtgggccgatgaattacttgcctttgcctttgctagagtgagatgcattccatcatgtaatacatcaaaacatacaccagagttctggcccatctggtgctctttgctcagatcccctggccactccctaattttctccactcccacaacttgctgacatagatttgattttcaattcagaacaaattcaaaacaagtaaaaaagatctgatggaattagcagacacatgtcaaattatccacagcttcttgctggagacacatggaaagatagggtgcagmacgtctccggggacccagagctggagaactcctagcagcctccattttctacaaagccacgggtcctccacagggttggccctagtgcccagaggtcaacagtggagacctgtctcctcctgggaggactggatctcatatcaatgcgtaagatgataattaggtattgccagcattccccttacaaatccttcaggcagggcaactttggagcacagtggttgtgtcttaggaggtccagcaaagccagttcccttcaacattagaacaagtcactcttccttctacggagcactgcctgggaagtgactgccactgccatgttgtgtgacagaggacagtctttaaaggggtttcattcattgtggacagatactatatgaaggcacataagggatttcctgatggggaggatggcaggggaggtgtcccacgatctcagtgcttgttcatcctgtctgtgtctctctctccactccctgccccactcctcatgttgcaaagttaaatgagaacgtgacacatttttcctgtgattttcattttacatttttagatgtggtcattatattcaactggatataacattttgtttctaattgaaaactttttccccaaaagtttttgtgcttttgaagcaaatgcgaaagtccatttctggcagggcgcagtggctcatgcctgtaatcccaacactttaggaggccgaggagggcgggtaacttgaggtcaggagttcgagaccagcctggccaatatgacgaaactccgtctctgctaaaaatataaaaattagccaggtttggtggcgcatgcctgtaatcccagctactcggaagtttgaggcacaagaattgcttgaactcaggaggcggaggttgcagtgagccaagatcgcgccacagcactttagtctgggcaacggagcaagattctgtctcaaaataaaagtccatttctaattccatttgagggatatggaataaagtacataaaaagtaacgagtcaaaagaaagaaaaggttttagtgaaaatgaatgtactcttctcccccttctattgtttgtaatagacttaatctttaaagcagttctggatttacaaaaacaaaaaaattattcagagtgtacccatatcccctcccgctacctctcacccctagttcctccgattattaacatcttgtattagcgtgctgcatttgttacaactgataccagtgttggccttccattattcttttaaatgtgaatctgactctggggatttgtgtgactgaatctygcagattgagaacgatttttaacaaccagccatgcttgtaaaaacatgtggaagtttctctgactctgaaataagagggacaagatggttcccatgcaggcttgcgttggaaatgggggagcgtgcacagtctaactccatgccccgtgtttttcttgagtagccctctgggttgaatcaccctggacttcagctgaggcagggggattgttttatgctcaagaaagctccaggagtggtagaatctggccatcaagatgttctgtgaaatggggctcttgtcttttctggagaacatgccttcttggccctttgatcatgagacatctcaccacgccctcctttaacattgctaatgatggggactgaccaccccgtcattaaaccccatggcagtctaagattaagccattcagaatcttactagaaatgactaagcggaccgttttttcttgtgaggagagaattaaaggcggtttccaatccctaatgataaaaccagcatcaaattgtagagaattgcaatttctttcttacaaacagcaaatttttgtctcctttcattttttaaactgttgaacatgtcagatggtatgcatagagagatttcagaggtctagtcaatgtgcaaatgttttgtggttttattttgagtttgaagtcagagcactgaattccacaaggcttgagcctcactctccctcctgagcacccaggcttcacggacatgactaataggagtttattcacagcctgctaccatccttggtcataacgttgctcaaggcccgagcaggcctgccaagaccacagtgtagccctgttaatatcacatgaccgtcggagagtttttggaaaacctcctctggccgactgtttatccgcccccattgatatttgtctgaagataagttatacagtctgtttacttacaaatgcgtcagaacagtcttggacttctgcacggaggttctgccaaatacaagtctaacagggaagtggtttgggcagccccggaaccgaagaacccctcagagcatcacaagccatcactctgggtccctgtcatttaaatagggattcaggcttcaggttgtcagtatttataggcttgattggagggaagtaagccgtatgagcaytttttaaatgaatttttatttctcatttccacttagtgatggatgcacatttttccactaayaaacatttgaacttttttcagtttttaagaacatcgtaggtggcatatttcacaatcttggcaaggcagacgtttttggagtaaatcgaaactggaggccagaagtactggctctgaactgaactaccacttgcaaatcgatgtagcagaaggaataatggatcatgtggaccacgcagaaagcgatctgagacgggcgtgtcagccgcatgtggatgaatagtcctttgtgggcaggaaggagagggagtgggtgggtatgagggcaggagaaagaatcagctctgtgtttgggggctgtgagaggacactcagaagaaggcttttacaccatattttatattcacaagtttatttatgttattttgagtccaacagaaagagtcacaaacgttaaactttagcaaccccctaatgattggaaaagatgggcaaatccttgctttaagagcagctgtatcgtatggagaagaagtcatctcygctgggaaaactcrcgaacagatgcaggctaaagcgaaagatcaactctccacaccattacattttgaagggctttgaagttatttttagaaaaactcaaaaatctaaatcaaaaatcagattttttcttttttttttttcctactgcttccttttcctttttcttcttctcttgtcccttctcctttttggttgtttctattgctatttttacatgttcctttaggtggggggaagataaggtgtgaaatgtattcaagtgcaactttttcaaaataataaaatacatgtttattatgaggaaaactcaactgcctatagaaatgacaacggtaaatgtaaataagcaaaagatcagagatataagtgtatagccatcacttcctttagcaatcaaataatgagctgggcgcagtggctcacacttgtaattccaacactttgggaggccaaggtgggtggatcagttgaggtcgggagttcaagaccagcccggtcaacatggtgaaaccccgactctactaaaaacacaaatggtgtttttagtgttttgtttttagtttagtggttttagattttagtggtggcaaatgcctataatcacagctacttgggaggctgaagcaggagaatcgcttgaacccaggaggtggaggttgcagtgagccgagaccgtgtcactgccctccagtctaggtgacagagtgagactctgtcaaaaaagaaagaaagaaaaagaaagaaagaaagggaaagaaaggaagaaagaatcaaataacaaaaagcacagtcagcattataagatatcagacatacccagcccagaggcagggtggagttggagatcatctagtccatcaaccaaatcaatttaggttgatttttttttaacaatttttttttttagccaagtcaaaaaaagtatttttagccttacttatatataactgtatcttttttggctcacttagaccattttatcaaaggagatcaaccacaaattcctgccggtttttagttgtaagaagctttttttattggcaggaaaactgggagaatgtgtaagttgttaagcagccaggccactctgtgcccagtattctggtaactattgtgaaggatgtttaagaagcaggtcaaaggaatgaaagggcattggggagaaaggtgaagaaaatttattgaacacctatcacatttttccctcactagctacttaactcacacatccgcacaggrgcccaaggttaaaccacttgtctagatcaccaaggagagcaaagataaaatcttgttcctcccgtaagccctcagagcctgtgatgtcagacaccttgttgagagataacattcacaaaacaaccagagaaccttgatggccatcatatattagtgacatattcatgctggcatgtggggcataagtgagctcccgtattgacttggtctgagaatgaagaagtctagctttacccataatgggctttaaagcagctctttgagtttggttggccccagacctaaagtcttgcatctctgaaccactttacctattttctttcccacagaggacaaaaataaatgtgtggaactgagcctaggtcctgtgaaaccttttattctccagatgcatagcattmccttggtgacacaatccagttttgtgaaatatatgaaaatattggaacttttcaaaaattgtctaaatttggggggatgtgccatgagaatgtttaaaatgcaaattcccacacagttcatctaattgattttaatctgattatgcctgccctgcaggatcttcctggcaggaatatgataggccacctgcttcttttaggggaaaacattctgttttgagggtaagagaagatttgagtgaggtttgctttggtcatggcttctgaagcttgataattgcagaagttccatctgtaagatgctcgattaaaattctagatgaattgagtaatctccacaaggccaagagaatctaatgttcttgaatttgttccatattcacgatagatctagtaaccatgtgtagtaatcagacaaattctccaaaacatacagccagctggattcctgaactttaacaaagtttttatgctgactgcttctgcaacctcactaactasccagcctagataggaaactcccttcttaattcattcataaagtacctttygatatatagacccaayctctaataaaccttttggagatcaatttgcatatgtgataaaagtgaaaaarttggtcttcagatacctactacagaaaaaaaagtgaaaaagttcttaagcagatgagaaatttaaataagattttaagtrttttctgaacattaattcacctcttgacttttgaaactttggtcagacggaaatgttcattccttctccctgaaagagttgatggttagatttcataacacagaagctagtaaagcaaatgcagtaagaaaagtagcctcccataggtattcaaacaygtattcaaaattaagacagcagaaagtctaaatgtttaaaatatgcttcattaacttctgattccttgaatctatccccayttattaatgtttatatagagaaccaaaaaaacagaaaaattactatgatgactattaattacatcattttccaaaagggggaaaaatattgtaatcaatgaaacctgartatacttttataattgataagattaaaaaagttgtaattccacttcagtaactaaaagagttattcagaagataaagcatttataatgatggacctagatttctgcttcctatagagatttcctgcccacgtacacatattctggttacacaggaaggctcatgagttgactactttggccagccttctattttgtaagtattggcagagaratacttaagaaaaaaaatgatttcataagtaaacttataattaagagaatgaagaagaagatgtagctcttggggcttccattgcctcctaacagaaaacatctgctggacttccggaattttcctaagaccttgagaacacacccacgcatttccaacttttttcctaaccagtgagttggcttcagcagttttcagttttatagctgactgtcccatccaaacagttgttcagctttgccctttatcataaattcattcccatttgtttattgcatagtattggttaccttctgttaattgggaggtggggaggaggaccagagaacaagctcataggtacaaaccttgtcaaaactaaaacctgttttgtagatgaggattggttccttgtattgttagcattgcctttgctcaagagaatcaatccaactcattttagtaccatctgtatctttcaaaatgaagaagagtagttaaaacaatatgaagtatggcatgtgtcaaactccacaaaggtgttttccatataaacttgagaaaacctaattaagtgggttttgaagagacaatggagctctgtttatatgtttgcctacccaggggaactaaaacaaacaaaacttacttttaaaaagcttcttcaaagttctcattttgttttagaagaactttcagcttcattgctttctaagtagcttgatatcattagaaactgataatgctcagcacagtcagckcaagataagttaaccagcttacatccacctatatgtttaggggttctcttggtctaaaacgtcttgaaaaccaaatttctgtgaatcagttactgtcttagtccacttgggctattataacaaaaataccttaggctggataatttataaaygacagaaatttatttctcactgttctagargctggtaagtccaagatcaaagtactagtagatttggtgtctgatgagatccaggattcatagatggtgccctgctgctgtgtcctcacgcagcagaaaggacagatgctccctcctttataagggcactaatcccactcatgaggacatcactctaatgacctaatcacttcccaaaggcaccacctctcaataccagcagattggggattagatttcagcttatgaattttggagggacacattcagtccgtaacatttcacccctaacctcccaaaatttatatccttctcacatgcaaaatacattcattccattctaatagcccccaaaagtcttaactctttccaaaatcaacctaaaaagtctaaagtccacagtctcatctaartatcatctaaatcaagtgagagtccaggtatgattgatcctgaggcacatttctctcccagtatgagcctatgaaatcaaataaattgtgtgcttccaaaatacaatggtgggacaggcataagacagacatttctattctaaaagggrgaaacaggaaagactaaaggagtaagtgatgccaggtgagtccaaaacccaacagggcaaagaacattcgattttaagtcttgagagtcatctctgactccatatccgccttctggacacactggggtggggattggttccttkwgtctcggggcagccccgcctcccatggcttcactgggcacagccttcattgcagctctccaggctgggcaaactggtcactccactgttctgggtgctgggggcagccccactcccacacctccccacctagaagaaacctacactgccatgaacagaatattattcatggtgttctgacagactgaggctttttctgcaactctcttcttcttatgagccctcaccttacggagtgaggagcccctctcccacaacactgcccttgtggggcctctgttgttggccctgctcctgtgtcaggtctgtgcctggtcacagaasttctccagggcatcccttggaagctgggtggaggtggccacattctcacagctcttgcactctgtgtgcctgcagagttggcaccacgtggaggtcacgaaggcttcctgcttgtgtcctccagagagaccatctgagctacacctggacccactggagccacagctggggcagccgaggagcactgcatccgattgcagggagcagagacttgaaattgttctggccccagggtcctggcattctgggcctaagatgggtggggcagccccaaagattgcctccggaggtccttcctcagttgtcttgattagcagcatctggcttccctctaccatactcatctctttatcaaatgtttgcttggctacaatctcgatgttctctgctgaacatgttttctactcttctactacctggacagtctaagaattttctaaatctttcagttctgctctctgtttcttgmtaaattccatctttaatttgtttctctctgtttacactttactataggcagtcaagaaaagtcatgccacaccttcactttgcttagatatttcttctgccaaatatcctattttatggctcagaagtctrccttccacaaaacacaagtagatgagcatgattcagccaaattctttgctgctttgtgacaaggatggccttccctttagtttcaataacatgcttctcatttctgtctgagacctcatcagaatggcctttcctgtmcacatttctaccaacattctgatcatgaccacttagggaatctctaagatggttgaggctttctctacagcccccctcttcttatgagccctcgtcagaatcacccttaaggttctgttcatggccatgtaggtttttttctagcatgcacctccagattctttcagaccctacccattacccagttctaaagctaattttacatttttaagtatttgttaccccagcatcccacttttaataccagtttctgtctcagtccattcrtagtccatgctataacaaaaataccttaagagtaggtgatttatgtacaacagaatgttattgctcatagttctgcaggctgggaagttgaagagcaagtgaccagcagatgtggtgtctggtaagagctctctgcttcatagacagtgccttgctgctatgtcttcacatgacggaagggacaacaggctcccctgggcctctttgagagatgcactaattccactcaccagggctgtacccccaggacctactcaccttccagagtccccacctcttaatgccaacacactggggatcagatttctactcatgaattttggagggacacagacattcagaccatarcagttactgctcaaaacaaagaagtaaaagctagcaaataatataagtatgatgtatttagatttattttagtattgctcattgcctttttaaggtaaactttctgggtcaattgagctgtttagatgccgactcatatttgaaggttctgctactcctctacaataccagacttataaaaatcaatatattgcaatcattcatatactcagcgaacatgctgacacctactgcgtgaaggrttctgtgatatgggcagggggtgcagacttgtatcaggcagctactctctcagaattcactgcctggcagggggaggccaggaggctgtccccagctaagacacaaggcatggcttgtgctaggccaacagggaggtgccgggagtgtaatacaacaaggaggagccgccaaggctcacaggagggtccccatatggacccaccattgctgagtgtgtgtaagaagaagagcaggaccagggaggtggrtctgagaaacagtactgattaagaaggagtccaggaaggaatccctgaaaagaaaatgaagaccaagtggatagagagacaggaaaggagccacagacagttctcccagagaaagaggaggttaggaggagggagtggtccacaggacctagcgcctctgggagacaagggtagaaaccacaccatttctaaaatgagttggggctgggcacggtggctcatgcctgtaatgccagcactttgggaggctgaagcaggtggatcacttgagctcaggagctcaagaccagcctaagtaagcaacataatccaaaaaaattagccaggcatgatggtgcatgcctgtagtctcagctactcagaaagttgagaagtgaggattgctttagcctagaaggttgaggctgcagtgagttgtgatcatgccactgcgttccagcctgggtgacagagtcagacactgtctcaaaattaaacaaagaaataaataaaatttaaaaacgttaggaagagaggaagaagagggtggtacctggagggagatctgggctacagagaaacgttttagaaaatccatgtaaaatccaaatgcagcagattatttcagaggtcaccagggtgaattatggctgggaaatggactaacacaaaaaagatgctggtgtatattgtggaggttcgggaagggtgggactcatgatgtgttcaacaaggctgtatggaagcctgggttgagtctgtgtcccaggaaaggcccactagtgggtcccggtgtgggacccacccccggcccccaccccttcctgccccttctggctttctgctccactcccagacccgtcttctccatcacccgacgttttcctagaagggcataaaacttacaccatgaggggacctccacgttagacagggggagaagctggaggacatgaatggccccgcagtcagggcccagtcacctgatctcagctctgtggaggtgaatgtgtttgagttgccctttttgtgaagacgtggtagctgcaggcatggacaacttacacattgagcaatttatatactatttgaagccacctcactttttcccttggtttttggtttctggggttttctaagaggggagagtgactcatgtctttcccactagtaggtggccttggttttaatgctgctcaatggattctaagagagcatcccaggaacctgctggtatcagcccagcacatttttggggtctctgggaatgagcttgggaaggtgagtgaagaacaactgaaaacaatgaagcgcatttgtggctggaggtcatgttctgatgaatcccgatcgggggaagccatggctgctcttgcagtgatcaagtgtctgccgcctggattctttcctggcatgtcagatttgcagcttccgagaaagtgctactgtcttgcatgacaaagtratatttggctcaaagaaaacactgccaaactgagcagccagtaaattctatgacagcattcaccataattcccaaatgtaaaccagatagtaaagtgtcgttcataaccagcggactgtcagaaatcagagaaatgtgggagtggcctgcagaagctgatctgctgcccctacggacactgatggcttccttcatcgatgcagactggggagaagtgggcgaggtgtaggccccaagcagtcccaggctgagagcccrgcacaggactggaaatactcatcagggttcacaggctgtctggtcttaaggaagtgacagcataagcaggagcatgtcagtaaattcacagcaagaccctgcatgcaattctatttgcaaatggaccctctcactcttgcatgacyggctccaatagaagcaaaactcaggtccatcctagagcacatcccaggagaagtttctctatgggggatgagcttcaaaagtaattgtaatttaattagaaatttagatgtgagtacctggtttttttagtgggactcttttttttttcttggtaatttatacattagccgagacgcttttcctactacactgccagaagttaacttctaatagagttcatacattttgttctctctcatgttttttctcygtcacctattcttcacaccttttaaatttaagaagyatgtatgtatacatctgtgcgtgtgtgtatatgtatccttggcagcagtcctcattcctttggtgattactaaacatttgaggactggtaaactgtgaggaattgaaccttgctggctgaaaggtagaggaccagagtctgccttgttccccttatgccttcaggggcccggcagggtctcctgctcctggggctcatcctgcaagaggcggctggtatccaagcagcccaccccgatcgcctcctcagggaagagggcagggcagttaggaggcaatgcttctccatggtgctgggaatctctgtgatataaacccggtgggatggaggagattatttcaaataattgatatttacttgcattgaccatgaaaccaacccttcacgagcaccctctctggcccagggcagcactgcgcccctcgggtgggaaagccggtgtgggagagtccaaccctgcaggaaacggcttggagaagctcccgcctgggacactgaagaagtgagcgaggaggaatgatgcgtcagttcagttcaccaggagaaacgtggaaaggccagtgtagcgaggagagcgtcacacagttgtggagatgtcagcagacacagtgagggaccatggatgcggggctccagccaccagagtgcagggtagagaggagctgcacctagaaagccgtggcacacgcagcaccaggaggcctgggcatcacatccaccgacccgagtttcactctgcagggagcagaggggccttcacgtttttacattagaaaggagtcggagaacacgttggatttcagaatttgaatgaaggcagctaagagaggagatgcatgagggtgcagtgggatggggtgcacagaggcagttccagagttaatgcaagcaagcaaggaggaagtccgatccaggaaggaggtgctgggaatgcagaggaaacggcagactccggagatgcttggcggaaagcccagtggaatcagtgccctcccagtgcagtgtgaggacgggggrcagcagtgtctcccccatttcaggttctgaagccyggcttgtgggccttgcaattcaccgagttaaggagcagagaaggaaaggggggttgtttctgttttttggagttttgctgggagcaaggttggaggaaatgaggtaagaagttcaacttgaagcctgctgagtttaaagtatctctagaccctctagacagaggcgtccaggarggaggtaggagccrtccacctctgagcgttcactgaagccgtttggtgtgaatgaagtatcccacctcatgagtttggagggraagagagcagcaaaactccaatgttgagcagaacagraatcaggaaggggccagaggagtgaggrgaaacscaggcgggtccgtggccaccagaagagcccattccaggagggagggggcagctgtgctggggccacaagggtccccagggcggggaggggccctcacagctggggatagtggcattgcaggcccttgaagaagagtgtcaggccagaaaccagctcaccatggttcaaggtgtgaatgggggacaggaagtggctttggaatgtgtccaggttctttttgaatagagaaaaatttcctccwtgaccatgcttccygaaaagagaatgaacccacactctgggatgtgaggccaggagagttggcttcaccgtcggctggccgtccccaagtcctgccccttctcccgctcctgtctgatgtgagaggtgttgccactgcagtgtatccaaagttccagacatgcagagccgccctctggccatcgtcggggtcatggatcctttaggagtgaggaagcgggatgcgctggtgtggaaggcctttcatatggtcgggcgtggacacagagagaaagcgccaaacatccttgcggcattgctcctgcctggcggaacagcacattcacagtgagacaaacccaggtcataatgagagcagaagaccacaacagccacatgacacgcgtacacacacacgcacacatatatatacacacacacatgcacacacacatacacgcacacatatacacacatacacgcacatatacacatggacacgcgcacacgtttacacacatgcagatatacacatgcacacacacgtacacacatgcacatatatacacacggacacatacacataacgcacatatcagcacatgcacacacgcacacatgtacacacatgcacatatacacatgtacacacatacacgcacatatacacatgcacacatatacacacattcttgcacaaaaatctcacaagaacatcacgggtgaagctttctaggaataatcttactaatattacgaagctgaccacccaggctgtgacgggtaaatcgcaatatggatattccaaccgcaaagaaagcaagaatgtaccgtgatcagcgcagacccaccccgggtctctagtttccctctcccagtaatgctccttgttcctaatgaaccgcgtgcatctttggtgtctgcgctgctgccgctacacctttgtgaacaccaaatgcgcaggaagcgtatcgggagcagcacggctgcactcagttgttgccttctrtttcgtggatgaaaactgctattgatttctcttttaacaagtgctgttgggaagaaccagtgttctggaggctgttttcgcccatgtcatgagaacagggcgccagctgagtcacttctctggaatggackttaatgtcacttggtttcctctcacccaggacccgggcttcatgtctggacaaatgagccrtgcattatctttccaccagactaaagaaagatcagtttcttgtggtttgttgttctttttttaattgcggatgtgtgttcagcattcgcccaaataatcattccaaaccggggagtcttgggggagtgcaggatgtccagatagcaccagccctttgttaactggagagacgacagacaataamcccggcgtggtgaaacccggcccacacgtcccgcccgccccagagccaatgctagggccatcargtggccctggtagccagtggttccaggaccagcatcagacactcggtgttactgtggacagtagctttgtacaagttcctagcgaggtgatttccaaaatattagatacctttaaagacagagatgaggaagactgaattgggatctggcttttactgtccgccatttaaccttcctcacaccaagcttcaaggcaacagggagcgtgagacatccgtgagcaagaagccaggctgctcagccactcgtgggccacgtcccctgtcccctcgcagggcttgcagttatcacactcaaagttagcccaggttgttctctaggcgttgttgccaagctcataattccacatgttcacagtcaaatgtatgtttagataccttaagttgctgctaacatcctgagggtagcttctggctgtaaacaaacataattctgatcactgtgagactcattctgttcttggacagccccttggggttcagtgacatggactccaagttcaccatctgatgtatgggcttctgccactggtgctgtcatctggcaccttcctaaaaccttcccattcgtacatgacccccagcacctgttctttttctcccgtagctttccttttcttcttggcgtcaaattcgaagccactttcatacccttttgttttcttcacgacaaaatatgttactgatgttactgttatatcagcttggtttgttcagaaatcaaaacagtgacatctttcttccatctggtggaaagatcatcagaacccagctaggtggtatcagtgaatatttccatttcccaaataaagaaactgaggctcagggaagggcagtgacttgcctgtggtcatagaactggcagagctgggattcaaccccggtagcacttcaaatctggtactcttccttcttgactgcacggggctccaaatcacgtgaatctgtgtttaactgatcagtgttaaatcacttcggtttgttcacaaaccaaatggccaccattctgcccttttctcctctcagctgccttcttctcgatgctcttaagccctcactcacggcctgtggggttactgcagggacttctaccaccgtctcccacgtcccatctcagctcctatctgtggtcagcacccaggcctccctacaggtcttctcagccacgacagccttctcccaaggaacctgggcctctgcgaagyggcctcctgattccccacaactcccctggaacacaaagctcgtcttctccaaggtccagctaaaccctgcttcagaatatgcttaaacagccaacctttttagcatgcagaactccacagctgtttagaaaatcttcctaatgcagcctgttttcaacaacgaatctgttcagagaaggtagagaaagcataggttatgtctaaatatttccctggagtgtgttactayttcagagtattagcctgcagctccaggggcctcctctgcataccttttgaccagcattgctaaaaagtaacagaaatggcttgtttgggtttcaccttctttttctacccatcactctttagcagggagggggattaatgagccgtgaaatggctacatttgagcagggtagggttaaagcagagaagccatgttcttaaatcacctctgcaggactgtggctggcttggttttgtacggatttccatgaaccccaggcatacattgtttatttttgtagacaatttgtccatctgcttttggcttaattatcgcttcaggaagatcagtggaaaagatgtattcagagtccaaggtcatgtctgttcctcaagggaagtctgtgtggatgacartgccctrtggaactcttttgaaaagccccatatgactcttctctttcatataccagccaaatggcccaaacctctctgtgcctcagtttcctcaccataaaatgggtacaatgacagtacctacctcgtagaggtttgtgaggactacataggctgactgttggaaagtgctccgaacagtgaacagtctagagtaaaaatgtcagctgctgttctagcttagtcccaaccaggggtcaaagctaataacctgaaacactctctygtggaccctctgcaatgggctgggcctaacaggtccgccaatacacaaatttggaacactttcctttaagcaagtcaaagggaagggaattgtccaaccaatcagtgaytgagtttgttccaccaccctgtagaaaggaaaatggaattcgatgtgctctttcgacatctttggaactctgcagtcaggactttccccatgggaggtgagctccccgtgacaaatgagggagctgccctctctcccactgagatgagtcattgtaacccaaaacaatctcaaaatctttgacatcactgccgcttgcaaatctgtgyctccagccaagggccggtggatgctactgcctgccacctcgtgttcaccaccagaactgcacgtcactccgaatctgctgacctcataccctggcatagaaacagtaaaaagaccaaacaaaaacgtgtcttttttggacccaaggttgaaatctgattttaaaacagagacattcagtaagcattaaacatcttccttttatagctttctcacagacctacattgacaaactcaccccttccctccataacctttacgcccctgagtcacagtagttgccctgaattgcttacgcaggtctggcttatcaccgacagttgtcctcaaaacacttggttcaaatgttaccagaactaaatttggaggagggagtcctggcattccagagcccttgcctcattttctagcgcgatcccagcagatggtctgatgtatctcatcagatgctgagcgcgggcctcactggcccagccctcctttccacaagtctggtggtctccttttttatgactccacttgagaggcctggaaaacattctccctgataatgcaggtgataaaaccagatcatctggtggaacgaacaatcagaaattccactgggcgggcacagggcttggagaagagttgagattgcggatgatgttttccggtagatgaaggtgactgaaggaattgaatggagggtggaggggactaaaggagagggtgaagtcctccacagcatgacccactgmtgctcggcatcagaaattgggaagtcattataatggtcagaaacgtggtctaaaaatagaagattccatgtgggaagaacatgaatttcggagccaggcagagggggtaaatagcagtgccataacgcatgtgtttaacagacagcacatggagtgtgttctgtgtgtcaaatcctgcaagagatgccggggacagagtgtgaatgaggcatggtccctacctccaagggcctcgcggtctcacgtgaaatgtgggtacagagatgtagtatggcagtgccctgcagtgtgccatggggaagragccccggccgcctcctccagttgtgaggaggggaagatgcccccagagagcccatgcttgagtcacatcctctagtgaccctgagagcctcaggcagcgagggctgcgtgtgccatggccctgaggttccagagaaactggcccaaccgctaggcactcagttagactggagagtgcagtgcactgtgccagcgtgggaaggggwgtgccagggcagtgggggacaaaaaaacscaaaggctatggcggggtggctcgcagagcctgcagagctgacacagtggcttgggggcaaggcagacaggtctctcagaggcccccttacctttgcttcacaaatgagacatgagccagcagtgcttggcggtggygagcagccgggactgtgatgtgggacccwcagcatgtgggaccctcagggcttggggaayrgtattgctgcatgcagagcaccactgggtccaggtgctgtgggtgagaggctcatctctctgggctgccccctcacctgtctacgtgagaattagacacactccatggctcccaaacctgcctgtgaatcttaagtgcttgggggccttgctgaaaacatcaactcctgactgggcagtggctcatgcctgtaaccccagcactttgggaggctgaggcaggaggatgacttgagcccgggagtttgaggctgcagtgagctatgactgtgccactgcagtccagcygggcaacagcaaaaccctgactcaaaagatatgtattccatatatataaattccctgtccttttgtgggtcatcagcatgatgctggggcgttcacactcgtgtgagacatgcctctctcaaaccttgttaagatgtcagcacatgacccatctcacatgaaaaaattaaaaagaaaaaaacaaggaaaaagaaaaatacatatataaattcttcccaggctccttcccttgactcccaaactgctagaccagaaaattcacaaggtctgagactccccgttgttggtactttggcggccagcccaggccagtcctgggacagggaccacttcagaacgatcacccggaaccctgttaaaatccaggacaggagagggcccaagtgccctgcctgattgctaatgagcccccaggtgactctcacgctgccgacccccccratctctctcagatgccccagatgctctctgaggtcccttccaagtccaacatcttatgaagcctttgggaaaataatcagttaccaatggcaaaaagcagagatgtaaatgtgaaaagtgatattatattggtctaatttcaaatggctatcactgtctataatctgtaagactcttgctagggaatgaggcttgtgtttgcgtattaagcaagacaaaggttgtttttgtatcayaatgtatgagaaggaaatattcttttatccaaaataaaatgaatccatactctaggtaagaactttggagccgtgtttctctttagtttctgtatggtagaattttttttgttaattatctttttcccctgtctttctgtagcagcagcactctgggggaatctcagatgcattgtgctaagtgaaaggagccaggctcaagactccacactgcgtggttctatttctgtgagtgtctagaaaaggcraactacatggagggagaaacatgagggttggaccgaggtttggagaagggagcatttgataacaaaggggcaacacccmgaatgttgggtgatatggagctttgctgtctcttgctgatagtggtggttacacaactctgttatttgttgtgtctgttaatgacacaccaaataacacaccaaaaaaagtgaattttattgtatgtaaattaaaagataaaatttttttaaaggagtaagaaaatgaagtcaaaataaaattaacagttaactaggcagtagccaaaggaggagaaggacaatggtggttatcaagcattttgtaacaacagaaaaggtggagttctatttaaagcatgtcctattcaggaacatttcaaataaagataagaggggaaaaaagctgtgcatcacagccagttcaaaccccctccccatgcccactgccccacttttggctcgtaaccttttttcttacttggccaatgtggtgtgtgtttgtattaycgtagcggaaccaactcaatataatgctaacttaaagaatttttttttctctcatatatatagacygcttttcagtctaaatgcaaaatagatataactcttggtcctgtccctgggctgtgccacagatcctgagcagtcaccctggaagacaggcggcctgcttgctcaactcaccgggagcccgcctttggaaggccacccacacgcctttcctctctgcttccacctggggcagactctgcagggctgttagctgcttactacctgcagaggccccatggggtaatgacagtcacatggcacaatgggaacacaccatctcagccatgagtcatgccatgctcttgggtgtgaagatgacctaagaataccaggaaaatattggcacrtgccattggcacatgaaaattagtaacctgcgcctgtgagtgaggtcgtaagtatagacaattagctcttttaattgccaatcatcgtgtgatcctggtagctcagtagttgccgcctatgctaattgtcactctctaaccgtgtaagtggaggccaccagcacagcatccgtaacctcttcatgacatccaggctgcatgagggtgatgctctgagcattgacacattgcatgtcagcagtgctaaattagaaagagcgtttcatacccattcgcggcctgacagccaaagctctctgcatgctgcctgcagctccagaatctgcttcctcctggccctttcctcaggtgcagtctgggctctcagggccctgaactcatccacaatcagactccaagtcttcttagaggacaagcaggcttaggaaatcacatcagtctattacacaatgattcacatttagacaaatgaaatgcatttattgctaaaagcacagaggtaataaaaggctttcccagaaaatcaacttttccaacacatgccaggcaaaatcatatccagaatataaaaagtttgggctaaaagccattgagcacaaccacccatgtgctgcctatttttagaataaggagcaggggttttcagacactgatactatgggtggggaagaggagatcatccactttttctctgctttaaaatgtacatctaccccagtcaaatcatttcagataaaactatataatagcatcttagaattataggtggtaccttctgggatttgaaaatttgtctatagagataaagcatgacagaaaccagtggcttcccagacttcgccttcactcctgaatctaattcggtcctgacccactttcagttctgctgccctgtgggctgtgtcccagacagttttcgaaatttctgtcagtatcaccatcagacagaccagattccatacaaggaaagctaggtcttggtttcttcagattatttccctggcagacttttcttttttttttttttgagacagagtctcactctgttgccaggctggagtgcagtggcacgatcttggctcactgcaagctccgcctcctgggttcacgccattctyctgcctcaacctcccgagtagctggggctacaggagcccaccaccacgcctggctcatttttgtatttttagtagaggcaaggtttcaccatgttggccagtgatccgcctgcctcagcctcccaaagtgctgggattacaggcatgagccatcccgcccagcccctggcagacatttttaaaaagcattcggctaaatgtttttttccaaatgtcactttaaaggtgtagactctccttccttttcgaactgttctctatcacataagctcatttgcaggaaaacctggaagggacataatctcggtcgccgggcaacatgcctgtgatgtcacagcttgtcttcttcatctttgcctttactcagctcctcttttgtttgtttgtttttaggtcaaggttattgaggcataattgacatgcaagtcattgaatattgacaaatgtatacagcgatagaaccaccagaatcatgctatggagaaggtccattaccccagaaactttccttgtgccctctcagttagtccctcccctccacctccagtcctggcagccactcatctgttttctgtctttagtttcgccttttctagaatgtcataaaaatagcatcagacagtaagtagcattttgtgtctggcttccttcacatagcagaatgcctttgagattcagcctcaactgctgcacacatcgggcattttgttcatttttattgccgaatagcaatyccaggagtgagctaatttaataaaaccaggatgaacattctcatacaggtctcggtgtggatataggccttcgtttctcttaggtatatacctaggagtgggattgttgggtcctgtgaactttagaagaaactgccaaactgtcttccaaagaggctgcacccttttgcgttcctgccggcagcccatggaattcgaggtgccatccttcccagctcttggcgtggccacctttttctgtgtatgttcaccatttgagtccatcacagttatatctctctgtggatttaatttgcttttccctaatgaccactgaagtttagcatcttttcatgtgtacaacttatttggtgcagtgtctgctcaaatcttttgccaaattttgcagttggattgttcatatctttagtattgagttttgagagttctttatatgttccggaagaagttgtttatcagatatgtgttttgcaaatatgtctcccagtctgtcycctgcctttttatttttaactgtatcttttgacaatcaaactttttaaatctagctaactttttcttttataggttgtaatctttgtgtcttatctaagaaagctttgcctaatccaaagtcacaaagattttcccctgtgttttcttctagaagcgatacagctttagctcttacatttaggtccatttggagtaaatgtctgtatatcaagtgacataaaggtgaaggtgtgtttctttacatgtggatgttacttactttgtattgacattagtgctacagtctgcatcacataattttggagggcagaaattccaagggtccatatagttctacctcatataactgaaattcttaataaagaatagtacccaggggtgggacaaatgttttatatactaaataaggagacagagatagaaagtgtccaacttaacctcagctctgtgttgcatggaataggctgctgatagttatctgtgtaatatactgtacaaatactagcctttacattattgttaccttggaacatgctactaatttcatcttgccagggtagtctaaaaattgctcagaaatgctaactgaccatcctcaaratcaacgaatatttctaaattttggccggtggaattatttttctagagcctaaaaagtagtcctttccaccttttgggacattttacgtatttgaaatgtgtggcaaagagctcacagaaattaactaggtcttaggttggaatccccggaggatcaccaggaattgcagccttggacaggccttgaaggtctggaacacactgcggaagggagggagggtccgccctggggaatggagaggatatgggcgtctgctgggcgccagtgcccataaaaggtgagacaggaagagtccgcttaggaaggagaagggatttcctactattcagatttcggctggtaagtcgtgaaaagctcattcttattctaccagtaaaatactgtactgtagattaaaaatcctgatgtgtagtgaagccagttttatcctgggcaacactgtttttatccttctctgataaatgaaactctttctactcccttacccagggaatattttaaggttaatgaacaatgaatggaaaccacagggttgtgtgatgtggggccctgatgcgtcatccatctgtccacctttgtttaagtctgaagctgtagggctacactgcgtgtgcccgtatctgatcatcttttgcctcttttctcagaagtgaaattccccaattgatgaatgcgggagtgtcgggaccctgagcgcattctctccacggtcgtggtatttgagtaatgtgggttcaagtctggatttgttgccttttcagactgcagcttccaaaaccagcccggatggcccatgtgcgcaccagccatgacttcrgagagggaaaacaatgggcagcccccgcgccccgtcctcacgatagtcaaaatggagtctgtcttgtagatatcactgaagtataaggccaagactgattgaattagagataatatttaacccacataaatactcttatgttcctctgcatgacccagtaagccagacctttctactgagccccaactccatgcttaagaggtttttcttattgaaagtcacctatctcttccctcaggaatgccaggatgggggttatggtggtctcgtgcattggttctcaaactgttatgtaccaaggagtatcctggggatcagttcaaatgcagattcaggagttctggggccaggcctgagactctgcatttatagcaagcccccrggtgacgccgacacagacctcccttggagcagtaagggcctggtggagtcagccagctccccagatctgagtgcaccccggccagccctgacactggtcccatctgagcccctgtcctstctcctctccactggagttcgtgtcactacatgcagttgccgtggggacaaaatgagagaaaccatatttaaaacttgtaacaacgcatcatctcaaaagatagaagcagttmaacgatactgttcattatcctgtttcttaggaartagtacctctacatggtctggtggtgggagcagggcggggggcaggggacatgacattaccactcctgtccacagcgtctcctggcttctgagaagtactttgtggaaatatttttctcaaggatgttggaggaatattaggagctttagaaatttaggagcttttgagatttatgcaaagacatttaaactagactcttttcactttctgggagtaatttttatttttaatgtcacttatcacaaaaggaaagaaagagatgaaaataacttttcctgtcgggactttttgactgaggatggaagttgataaggacgatgattagcacagaggaaaacccttggcrtgtacctggtcctcccagctgctctttatagatgcaccacacttccttagtgggcaggaaatcctggggagaagctccatcctgatgaccaaagcgtggcctcctcgggccatgctgtaaatgtccatttaatcccagcaaggcaggctttacattgtgcacagcggagagggatccatctgggaggactaaggtctaactcacattctgcccaggctcttcctggccctctctcagcggggaagctggatggaattctgtgaaatgttccatctcatcagaagctcaggatggactgtttagaagtgatgccatcttgacacttactagaatggctatagcccagaaaatggaaaatcacaggtattggtgaggatacagaggaattggaacctttgtgcattgctggtgggaatgtaaaagggtgcagtcagtgtggaaaaagaaatttagcaatacctcaaatatgtgatactcgtgcacacatatttacagcagcactatttagcaattccactcctaggaacacacccaaaagaattcagaacagagactcaagtagtcactcacacacacatattcacagcagcgctatccacagtagccaaaaggtagagacaccccagatgtccacgaacaaatgaatgaacccattgtggtctatccgtacagtggaatattattcagccatcagtgaatgaggtaatgaaccccaaaaacatgatcactaaaagaagccagacacaaaaagtcacacatcgtatgactgattctatttattggtaaatccgtagagacagaaagcagagtgatggttgccaggggctgggaggaaagggaatggggagtgattgattaatgggtttggggcttccttttggggtgaggaaaatgtttgggaactagatagaggtggtggtcacacaacatggtgaatgcactgaaaggcaccgagttgtatcctttaaaatggttagctttatgctatgtgaatttcacttcagtaaaaagaaaagtttacagcatactccaggaaaggaaagactagagtttttcattccaaagtcagactccctaaccaagaaataaagatgagaaaggggtttactgacagtgaaaggaaaatgagttcatgatgtggttagccactttcccccatcaaagggaattgaggaagggttgacgaatgcagataagaatgtggttttcatcaataagacgtgcatatttccattttggttagtagcagatgttccctttgagttgactgtatgaaataatccccctggtcactgctgcttgtttggttggctaaaaaataataataatcccactggatagatatgtagtttatgggcartaaagcgacagtcctgataagaaacattttatcccccagaagacagccggcagacactaacaaaccgcaggcctcaacatagtgaggggagcgtagagcttcgtggcatggtatgtaatcttaagaaggttatagtctagcatagccacaaactaaacaaaattgagcaccactgggaaggatccacaaaagtcggaatcaaaacatagtttgttcccaaacttaacaacaaatgtcgtgtaggaaaccactaagcattggagatagaatgagtctgggatatcgtgcgtccagggccagggccacccatcttccatgagtctcctcgcctaggtagaaacacagtggcaatagcttctattgtagaatgttctccaaagacactaaagtgcacaagcttcaccacgacttaggaggcctgarattaggctgcccgaggtgagtactgatgtggcattgacaggacccctctgggacaygtggagggcagaggagaacccactgtctctaaaactctgacttcggtccagaccaggttaccctgagggagatttcccagctccccttggtttgaggggacaggggtcccaagattcgggatacatcatcttccatccacagccttaatctgcatggatagcttccaccccaaaaaatcatcttaactacttcccgtgatgcctggggcctaacatctcaaggaattgccagttaggaacagtaatgaatttggaggtgagatctycccacacccctccatgctactgcctcaatgacattaacactgtaccctgggctgcgtttttaaattcccatttcacttcaactgtgtggattgctgagaatggcattatgaacattctgtgaagacagacacgtctcagctgaacagtttacctaggaagttacctagaggcaacagaagaaaagcctagaaaaatggctcaagttccccctcaatctcagggcaagacaggaatttgacatttcacagcaaatggggcttggcaagtaaaggtgccgtgtgatgaatcaacagcagactcattcgtctcaagaggaaattaggacatacgtttttttaagtttgggctagcctgtgaaatgttaaaatataactataatacaatagttagttccagccataggagagatagaacttcccctcccctcctttctcatttttaaaacatttttattgtggtaaatttatttttaatktttttaatgtaacattttaaaatttttcttgtattagaaatatgcatatgtcctcgcttatgagtgggagctgaacaatgtgaacacatggacacagggagggaaacaacacacccggggcctgtgggygggtcggggggagggagagcatcaggacaaatagcaaatacgtgctgggcttaacacctaggtgatgggttgatactttattgtattaagttccagggtactaataaaataaaataaatgcataacatygaaattaccttttgagtcatattggcgtgtctgattcagtggcattaagttctttcacgttgttgtgcaaccttcaccaccaatccatctccagaactttctcatcttcccaaaccgaagctctgtccccatgaaaacactgcctccccctgtccctctctgcccggcccctggcagccctcattctactgtctgtctccatggatttgagcgtgctagggactgcatataaggggcctctatacaggagttgtcgttttgtgactggctcatttcactcagcacagagtcctcaaggttcttccgtgtcacagcctaggtgactgcttccttcctctttaaaggctgagtcctattccattgtgtgggtgtctacccattgttggacacttgagtggtttccaccttttggctgttgtgaatcacgctgccgtgcgtgtaagtgtaccaaagctagcccctgctttctgtatgcccagaagtggaatcgcgggatcccgtagtgattctctttttttaatgtgttaaggagccgccagagtgttttccaaagcacctgcaccatttcacgtgcccaccagcagcgcacggagattctgatttctccacatcctcaccaatacttataactttttttaataacagccatcctatttagtgtggacaaacatttttatatgtttcagaagctcttttttttcctctatgtgaacaaaaggagagattaaccacttaaacatctgagggtctttttgatatttgaatgcaatacacatttccacagttactggatgcattatattgaggaaaatagagataaaattgtagaaattcatttggaaaattttttatactgaaatgaccttaaaaagaacccaaataagttaattctttcatcccaacccagtattatcatttcacaatgacatgactttagtaatttaggataatttttttctcacattccatattttctcttcttaaactctatgacttcttttgttagctatcatggcagtagatgatagtttacatataatgttccctgtagattatagctctttaaaaacaaaaaaaaaaaatgtagttttgaaagtaaccgtaactgatcatgagtatgtattgtgattaatcgtggaaattgaacctttgttgttcccacagggtcagcctgggccagtgggcccccaggggtacaatgggccaccaggattacaaggattcccgggactgcagggacgtaaaggagacaagggtgaaaggggagcccccggagtaacrggacccaagggcgacgtggtacgcaccgctggtgtattcccctggcctcatgagggtggcgggtatctcagccttggttaattgcatttgctttcttcatagggagcaagaggcgtttctggattccctggtgccgatggaattcctgtaagttttatggaagactggaattttaaaacattgcgtgcatcctaggcaatacatttgtgacttaaagaaacattttgaatgagacctccttttttgtttatracataaaacacgtggggactatacgtgcgtattctccccgcggaattcagtcagacagtgaacaarttgtttgctttgtaaacgtccttatagacttggcttcagaattgagacgattttgctaaactgcacattgtttggtaataaaaagctagagtgctgtccagatactcgccmtaaagagccagtcttgtgatctcgttcgaactatagagcaacctgcatataaagtcgttcagccaagagcatgggcagaatgaagccctgctgagcatttgtgcagcttctcaagttctttacagcaacctcacataaaacgaaaaacaaaaggcatggtttgttcatgagaaaaatctcaaaatgcaataaaatgtgtttttataacctagtttactttacttctcgtggcataaaaaaataaacaaaacagcctgactcacagccttcttcacagggacccacgagcagatttcccagggttggcttcctggccagacctgacctcagggatcaatgtgtttatcgcacgttctgacccacctcccatccggctactgctgtggttctgagacatctgcttcacaaacctcacacatatacacagatgtgtgtgcccgtgtcctgcagaggcaggttctgtatcaccacacacgcacacgcacagggagagagactccrttcccaggctgcacgagtagggccatgccttgcagaagagaaggagggaatgagtgagtggagggcagtgccagagaactcatgcgtttccatgagatctttagtcccaccgtcgaggagacatcygcagagcagaaggagacagtcagggcaaaataaaggaagtcacatttgccaagacaagagctgcaagccagtgatctcggggctacctgaatggtaggctcaaacaggyacttgggtttaccacatggccctgaacaaataaggaaataatgttcacatcagtcagaatcttgagaaatggacagaaatgaagaatctgcacaacccaaagattaaacaaattaggaaagtattttcatactaatggcctgaatctaaatcacccatttttaaactactcttttgaactctttggagtgtctttcagttttgtctccagctgaaatctgagttaaaatggaatgacattatggaaagcaattgcaactcatctgtaccaagtttccttcatgtttccactttacactcacttaatatcagaggcagatgtctcacaaactagggaagaagtaatcataatttggaggaatgattgtggtgagcaggtgaagaccattttctactgaacctgctgctcaaaggatccagtctcttaaccgcagaactctgatactacaaattaagttaacataaatatcacctgccataagtaatcagttaacaaatgtagagtttgarggacctggatcattttagctgattagaagttatatataagaagcgatatgcagtaaaatcttagaggagtggtctcatatagcagtgaatctaatttgatgctgagcagagacagacatttagctcaatataactgaaatttttctttgaagcacaatttcagactcagattagattgacatgcaatttcaaatagatcagttctaagcaagtaagaaagaccaacggcagacaaataatagagaaaaatttaaacattacagttcattttaagcaaaagcatcacagaatactaaaaatctggagcagaacatgtggagagctgttttctcaagctgaagtgcaagggccccttatgtctttatttgaaaggccactagagtgccagctctgcaaacagatcgagaagctgccaacaaacagggattcctctggctcaccagagagtttgactgagcctgttggatctctcatctgacggcaccagttcaaccaatggctgtggacatctgaagcaaagaaatgtgcaaataaaagttctacttttttattttatttcttaatatcattcaggttacggagaactatatgtaggatttgttgtgtgggggtwttgaggtttgtttgttttgtgttgttttgttttgagacagagtcttgttcgcccaggctggagtgcagtggtgcgatcttagctcactgcaacctctgccacctgtgctcaagcaattctcatggcttatcctcccgagtagctgggattacaggtgcctgccaccatgtctggctaatttttgtatttttagtagagacagggtttcaccatgttggccaggctggtctcgaactcctggcctcaagtgatccacctgcctcagcctcccaaagtgctgggattacaggtatgagccactgcgcccagccaagtttgtttctttatcttgaaattttccaaatttctcaaagtaactgtaaaagacatcccaatgctctcaaaaatcactctggaatatatgtttggtttattatcaagaaaactaaagtttaaaagtaactacacaataacaaagcatatagctaaatatctattgtttaaagaaacagcaaaacaggctgtggccaggtactgcataaattatagattattaacccagcccctgtgtgtctcctggaaccagcttaatgcagtgaagatgcccacaaatttagcctgagtccctctagtcattgcagacacttggctgtgttgcctttccccacccccagacatttcagaaaacctgacttgctttatattcawgtttaaaatctaaaaggtcatgtttcctaagaaagcaaacaagaggcaatcagctcttytaaacatgacaaggccattgataaaatcacgttgcgggtgtgtcttctctgtttaggatgtggatctgtgaaactcactatctaaaatgcagttgggtacaactgataaggacctccctgttttccctgagaaggaggtagctgcttctaaaatctttcctagaatttttaaaatgtacctttacttgttttctacagggataaggaccttcctgttatccctgagaaggaggtagctgcttctaaaatctttcctagaatttttgaaatgtaattttacttgtccctgctgatagacagtcactcaactagtaagacagaagaaaccccgacagtgtacttcttacccaagcccaggtgaagcagaactttgcttcraaatcttttccctgcttagaacgataccttatgccttcacttatttaatctttcattcattcatttgttcacttttgaggtgtcttttccttggattcatgccgggaacatggcttatgagaatataagactgttttatctcacagttacatgacaactagaagcctgctggttggctgattctctcactgctctctttcccagggacacccggggcaaggtgggcccaggggaaggccgggctacgatggctgcaacggaacccagggagactcaggtccacaggggccccccggctctgaggggttcaccgggcctcccgtgagtatccccacagcgcctgtgctccagggacgggcagacccctgctaagccctgcctttataacctgggggagcctcccgctcactgtggccagaacggaagcataactgtatgttgacgcccaagacatgacgtttctggattcaagtaacttcatttttcgtattctttaaatgttagatagaaaatcattgttgtggttgatgttgttcactctcagtctcccaagtgtcacttcattttctcccaaattctcatgcgtaatagtggaatcgtaaacgcaaattaaaaagctgaaaccttgacaaaattctgtccatcaccatctttatcagattatgaaatactttgtgacgtgggagtgcagttattctccagcagatacgatgcaggagtttgttttttaatggaggaacttttatataatcatctgttttgtggcctcatttattttttaaggtcttggtaaaacatcctgaaatgtgtcttcagtagtacgttgctaccttatttccaaggaaatcttgcaaattcaggtttagactaaaattttgtttggtgagactttttatttaaaaacaaaaactttaaagtggggagggaagaacagtcattaatcaccttcatcacgttttcacctgaagcaaatggagttctcctactcagttccacctccacctgctagttcmcctttcctcggctgtttctgttttatgtggttcaatttttcaataaactacrtcatcttctactctatatatcatcaatttcattatcaagaaacatatctattactttaagtgattcttatagtagatgttgaaagatatttacacatgcacatatgtattatgtatatgcctactgtttatatttgacacaattccaattttaaagaatgacccagtatctattctgcaaatgggtgcttgtgttaatatgttcagtacactaatgccaaagaaagcacgtaatagtattatcagaaataaaaataacattggcatactagagggttggttgacagagcattcatttgggttttgaaaataatttaaatcctaaagtatttctgttttaactctaggaaagatatgattgggtcaataggaaattaaaggtctyacccttgttgctgaatatagggttggtgttcagaataacccccatcagccataagaacaattagaccttgcccacaaaagtcaatgttcagtcatccamattaccatagctgcaccgaatgttaatggactctttttgttgttttttctttttacaatatatctgctaattaggggccccaaggaccaaaagggcagaaaggtgagccttatgcactgcctaaagaggagcgcgacagatatcgggtacgtttgcaagasatgggaggggtaatgaagggacccagtgtaaattctcaactaacaaagttaattgccaagtgaactttgcatgtaagaatgaatgtactgaaggcatgcctagaatggcggcataatctaaaagtcatcttacttccgatcaggatgttttcaatcttatttttaattgtgtgtttatctctttcccatattcacaatactccaagccaaattagtacttgtagttaatattagtaaatattaatattactaaaatatattctgactaaataacaatattagtaaaaattaatattagtaaattaacattactaggtcctgatagggctgatctgtttgatatgcttatttccaactctgcaataaaaggtaagtaaatctaaagatggttaaaagctatcactcttaaaattatttcttctccattagggtgaacctggagagcctggattgktyggtttccaggtaagtttatttttattggacgatattccaaacaaaagtttaagagcttcagaactccaagtaccagtttacctctcttaaaaacattctcccgctgcctatccatagggacctccyggccgccctgggcatgtgggacagatgggtccagttggagctccagggagaccagtaagtacctggacacaggtgcccactytgggaccatcgtccggtcatcccttccagatgccacttcttcaatggttgactccagatgagagctttaagaacaactatgatgcttataggcgtagcagagaacatcaagacaaaacggaccattccttgcacactttgctgctgttaaggttgaagaataagggcttaaaattatggtcaccagctctctgccagttatgtcaaattttgacttggttccggcagggtgcccttccatccccaccccatacctacccagtgacagacagcccatcatccctgggcaaggcaaaccaaagtcccacaggttcataaggaggaaatggaggtctgcctgtgccacacccatgctagcaggcatatcacacctgggctcattacagcaggtgagatactggccactgtttaacacaatggccctagagggctcattgcaagtagggaagagcagaaaaaggcacttgctgaggcttgtgtagctctctggccactcccaccactgcacaatgasctggaaggtggattggccactgcgagagctcctgactcgctcattccccacatatgttagtaatcagataaataggccttaacttacacaaggagcgatttgggctgcaggtgagagagatcttctcacaggaagccattgctcaagactgagacaagctatcaagggacactaacaccagttccttgacagatactgagaaaaaaatgaagtcatatatgtctggggagactcagtcaaactaacagttggggggtactcataattcycttcagattataataaatgacaataataataatagattttgtttctacaaagcaaatttccccggtgctgtgaaagtcattcttgcaagtagccccgtctgtgaaagacctggtcaaggtggctgaaatcagggtcatacgaggcgcygttgctgtttcactccatagggttattggcttagtcacggcacacatgccacatggttggatttcatactttaaatgcaccactcggagaagtccggcacaacagattgtacttgctaggtcctcagctgctctgacagcttttggttcttcacatgagccatgcaatcatccacaaccccctccctatccactcctttgtatccacttatttgtacttaaacactcttcccctgcatctgaaatgctttaatcctaagcacagtgttgacactgaatgytctgcagaaagacacaccatgatactgcagatggactttccgctctgcagtgccagcttgtagattcattctgtccatgaaagttggccaagctaccaggaagaagtcctgcatggagtctcgtggggactcccagaggaagtcagggaagctgtcgctgcagtcacagggcctgggaccttgcaaagggatcagaacaaacacagagaggacaygggtgaagtcaaaagcccaaacacacaaaagcaaagcagaaacagctgtccgtagacagccggcagattctgagaactggagctgacccgagtccytctcccccagcatgtcatctctgccaagccaaatgcatcagaaacctccatgcatcctacactgtgtcctaaatatacagtcaatggctttcccagagctttccaccagatgttatctgggtcctggggtaaagaaaaccatttacacatttytttgtatttgtacagggaccacctggaccccctggaccaaaaggacagcaagtaagttggttttggggggtgaggatgagggaagggggtacttaggtgtttgtgggtttgtttgttttttaccataaaacttcttggttggcaactatttattgtttatattatgatgaaaacagttttggaggttttwaagacttaatgttaaactccaaggatagatccatggtgcctctggacattaaaaaagtaaacaggtggaatgatttgttgtttgcaaattaattaccacatgcctgttggtatatgaaaaccacactgaggaacatttgattgaaacgaagattagaacaatttagggacagttcacatttattcacatgcattgatttacgagaatggacaaaatgtaactctatctgttgtagggaggccaatgtcattcttcttatctggctagaattaggttctacaggagtctaatgtcagcctctagggatatattcagtgataatcaagttaggctagagcccaaagctgtatactgttttcatcccagaaaggttattaagttgattggaacacagcaaagtaggtggtttgttagaaactcggaggacagaactagggttccttattatctgagaaagctggataratgtccaagacaaacgaatgcagttgacaagggaagtatttgatcaaaatgcaacataattcagaaatgctgggctgccagcgggaagcatctaggaacstttcctttgccctgtgtcccgatggaggacgtgccaagcccacacgttgccatgcctgcccattgcygtgamccctggtgacyacagctgccaccgcccatgcccccaggctcctgtcccctctgacacagcttccggttggctggagggcttgcgctggacgccccaccgcctggcagcctggagcaggatgagatgggccccaggccaagagcagcagaaataggaccaggcggccgggctgaggaggcagcagccaagcccygagcccaggcgtgagcctcagatctccccttgctgcggcaaacatcaacagccctcctcacccctgaccaagtcacttcctggtgactttgacgaccagctcaggaggcagagaagggactgtgggggactcacacaaattgcattctaatccagcctggccgcgtttctgtgctttgatttcagctccccaccaggtggggaagaagcaaaaggcaaaaattcattgaaggctttgtttttattttcagaaaatatctggacattggagggggcggacggtagactgcagagaaagagagatcagatagggcttatgtgaccccgctgtcactgtgggaacacacagaaaccctgggaaagaagcaaagctgttgggagtagaagaggacagtgcccgtgatgtgcacaaatttgtcatcttgctttttctatgcacgaatcttagaggtcagcgttgtcagtcctcccacacgtggctactacrttcgtgaaattattaaatccttactatgatactgggcctagctttgcttcttaggtaaaaaaggaagacaaaaagtttggataaagcccagagaatcacgtaaaatcattacattctgattgattttaaatttccaaagattattaaaaagataggtaaagtttatatgaaatgaggattattttgccaaaatgagagaagactgagccagaagaaaagacgaatcatgatcttcaaatgcagagtccagggagtgaaatggggctgcttcttccatctgcaggggccagaacccagggacatgctcttagactacagtctgcagagaccatatactcacgatcragggccagcaccacctggggtccaatctcagctcccactcattcactctgaggccttggtcaacygacaygacaaactgtcaattagtttctacaatgcaaagcaagaatattatgcaaatatagttgctcagtaaagttgccrataaataggccttgggtttctttttctaagaaaaataattttatttctctctgattattggctttttaaaacttacagaaattatttatcttttcagggcaacagaggacttggtttctacggagttaagggtgaaaaggtaaaggaagcctggtcaattccagcagaggcatgcagcatttctcagccaggaaataaatcattttaattactaagttctgtgctgtaaaacttttaccttgagttgatctgcagacagaccatttgcatagggaaataatcattgcaaagtgctaggttgtcacctacataccagtgataattctgcatcaacaagacggtaaacatagaccatctaggctagccgagactctgacacagagacataagctcagctcatcttcagaaggtggaggtgaggacatgtcactgagtgcatcttctcctgtgtggagcccagaggtgatggaggggactgagactacagccagaggctgacatggagccatctcagggaccaggggatctcagggaccagccctggtagggcacaaaggcagccgtaaggaccatgtggcttttctccttccttagagtgctaagatccaaagacctcatggcctttgagaggaacgtgtgagatcacgtgcatgacaggcttaacgcagcgccacaccccgcaagcaaaacctcaccaacacagtcccattgcgttcaccacaaaagccatgagcccactgtaaagtagacctgacccttggcctcatgattggaacatttctattttgttttcccttctgctttttgatggaacagcacagtaagttgaatcaagtcctgctcatgtgtgaagaagaaactcttccttctttacattaatgccatagaagaagtcaaaaaaggacaattagcragcagtgggcttctgggaaaaaaaagaaagaaaaacattgaagatccaaacacataaaaatttatagccccatacaatgaaatataacaaaataataaaaacaagaaaaatctgggaagaaatcattggtgggagaagagaatagtcccgttagatataatggagatgaagttagagtctacagtctacaaaggacttatgcaaataatgaataaaaaacatcaggggcccaacaggtacaagggaggagaacaaacagtttgggtattttaagatattctattagtggacactcagcgtacactatggagtatcactttctgcagctgacccatcatctccatttactgctgtccgtgttatgtgatatctgggctcagacttgtatgatacagtttaatgtggaaagaaaggaaaagacaatgatgttcttttgtgtcaatcagtttctgggaggtaaacccagaatattatgcaaggataacggtccagtaatgttctagatagatcggtttcaccatctgtgcaccacatcaaaaagtgttttctgctaatgataaaaatgcaaattaaagcaatcttgggatattatagttacttaagattttttttattatataaaaacatctttagctggggaagtagtctttcatttcttcagcatttcgtttatctcggtgcccatcttggcaaccagtagagtaatacctgtcaaaaaccataaagacattcagccctcatacctaataattcccatatatagaaattcattgtaaggaaacaaccccacagaaacaaatgcagtccagaattgtaaacaacctacatggcttttatgcataaattctaaatgattgctaatgaaaggaggatataaaaaacttacattaggwttactctattttgtggttattatactgtaaataggtatacatatggtaagtaatatgcaaacattaaaactgcagtattttggccaggttgtatttgtattcgagttttgtagtttcctttcgatttaaagacaactgcttttgcttaacaatatgcagggtgacgtagggcagccgggacccaacgggattccatcagacaccctccaccccatcatcgcgcccacaggagtcaccttccacccagatcagtacaaggtaaagagcaaaattgactcttttcatagttgaaataaaaaaaggagagtaaaagtacatttcttcaattgtattcaaccacattccaagtagaaaaagcctcaccaccaacttggcacattacccatgaaaacataaccgggtcctcccagaatkttttcaactcttccagacggttactagattcacagtgcgatcccgtcgtcagtccatcatctcaattctgatgaatctgaagcaacaagagaattcatttaaaaaaaaacttatatctatccttacattcagtgtaggtggaggctaatggtcataccgtaattcaaagccagaatcatggaactgtctagcaaaatgtgttcagcaaaataaaacctacttctttgctgacatgaagcacctttttggaggttcaaagtcagtttttgacagtttctgaatcattcaattaacattttgcttaattgaaatcatgctcttagtctgaaataggaattgccgcgtccactctctctacgtttggaggctgctgtgccacccacccactcrgaggtcccacagcctttctagggcttcctgttccccctgtcaaatggggatggcgacactgacctcctggagctgacraggaggttgcaggcgactgtgaaacactcagtaccatgtcgggcacgcagaatatctgggaactaaaatagaaaccccaaacggggagatcttaactttccaaatagaatctggttcccaactcttgagcagggtggggcttgggtcctgtgtcctgggtcctgcatcctggggcggatttggcaggcaggaccactgccttgtgggggaaatcaacccaggtggctgaggctcragttatgagtgaccgttgacaaaaatgtcctgggagacggcagggagggcctctgtccagcttctggactggagcccagagcaggtttgatccacgtggaggtgctcaatcttccgagtcaagtttcccaccttttctacaacccaggccagggtgggatccggggctgggaatggccaacccgcaggggcagttgtgtsctgcaggaatccaaggtaccctcagaaatgacggggacaaaggacccgccaattgctgtttctttcaccattttagacgaagagaaatgggaaaaacgtagatcatgtttttgatctatgatattgacatggctttcaacagccacttttgcttcaagtttcaatatgttccatgtgtatctttttctcagagggcctcctagtaatgttttcttccgaagagtattttcattaaggcttttccttgggcacgttctcccaccatacggatgtaaacatctgcctggaacggtgtgggggataaaggaaaacagagagaaggaaagacagactttcacttgtaccaagaggaatacaggaattaatttatcttgtgaaaatctagaagaaatgacacctcttttctcttgaattttgaagctgcaaaatttaagagtcatgtgttgtaatcaatttatgatgattgtgtgaggattgattcagtactttcagctcatgtcatgaaccctgattgatttttacccattaccatcctcaaattaataagygtttcttatttttcatattcttcacagggtgaaaaaggcagtgagggggaaccaggaataagagtaagtcgagtaatgagcatgccccctcccctgtggctcctgggctgtcggcgctctgccaggcatgacggggtgcaccatgcsctcggggcccgcacaccgccagtctctcatccccttgtccatagcagaacagtattagcatgcatttttacactgtattttaagaagtcagttctagaatttcttcctcttggcatcataaacactggctaatcatcttctgaggtttgggaagggagcatggagatggcggaggggcgtggcttccrctcaggcgccaccgggttctgccctccgtcccctctgtcactgcctgtcctcagagctccagctctccctcgyggtcgcttaccacgtgacatgacacatgcagtcctggatgggtgacagcccgggaaggctggcgggtctcctaggaccgtgccctgcactgcgcctgagttgagcatcgccaggcggtctggacrccatcggggctgagaacacagagtcctggagcagaggatgacacgtgggccctgttggctggaggggccgcccctgggttgctccttacgccccctctgctctctcctagggcatttccttgaagggagaagaaggaatcatgggctttcctggactgagggtaaaccacgccttttataactgcagttgtcggtttggtttggtttttttcagtaggctttcctttttagagctgtttcagattcacagcaaaatttagcagaaagtatagagatttcccgttattactccccacccccccacacacacacacacagcagccccccagcacgaacatctagcactgggggctgcgctggctacaatccgtgaaccgtcttgacacaccgtcttcacccagcagcaggtgtgcagacgcggccctccccgtggaggaggcgcgagtaccgcacaaaacctttctggttgtgtgtgttcagctcagttagtctgtagtaaccagaaatgtagaatatctcaaacacacattgatttccgactgtcccaagagcccaacaaaaatgtccctagtcgtaagggtcgggaaggggtcaccgtccacggtgattcagccacctgggagacagacctcaccttcagagccccagcctggactgaccccactcactccacgaccacacctagctgagggctgggacgggtggtcagagccctgggcccaggaagagaaagcagaattttggtggctatctggcagttgctaccactcaaaagaccgtattttacattctccaaaaataagaatagagagacacagtagaacattagagtacaagcctttttacatttttagtttttcattgtactatctttgtgagtttctctgtatttctttacgtggtagaaatgatgcacgttatgaaagtattgctaaaatgatgtgtctccctcaggaaatgagagtcttggggtggctctgacgtcttccacagggaagcagctttgagattaggatggattctgctttcttcgagcctttttatcatagtcattatttcccatccccacctccccacaactttgtaaaggggaaagaattgtattaatagttggtattgaatttggcaatttgttgctatkcttcaaaatctggacctgagacttgttcaatctgtccatcggcattttgctgtgatcacagccaggtgccgtagtcaagccctctggaaatgtctactgcatattctgagctgtttgcttctgttttttgttcattccagggttaccctggcttgagtggtgaaaaaggatcaccaggacagaaggtaagttggatgcatgaactgcagtctgctctgggcccacgacatcccacagaggttaaataaataggccttggcatctcaggaaagaaaattgtctccagaaaaaaacattgaaaatggttcttgtatttgcagtcacaaagataatcctgcctcacaatacttgaaccgggtcattaccttggctctcatttttgcaaactatcttttgcttcctccctttcaaagtgtccgtcactcgaccccaccagccatggtttctatatcgtccaacctcacacccctcctccatgtccttgtcactcataggaagctcctggacttggtgacccagggtccacctaaatttttttatagattgacccatactgtgacacttcatttatgtttaatgacaacccaattatttttatcatgagttctgtggacagatttttggcttttttttaggagaaaaatgttatgtaagaaatgtattatgggccaggtgcagtggctcatgcctgtaatcccaggactttgggaggcctgaggagggtggatcacctgaggtcaggagtatgaggccagcctgaccaacatggtgaaaccctgtctctactaaaaatacaaaatttgccaggcatggtgtgggtacctgtaatcccagctactcaggaggctgaggcaggagaatcacttgaacctgggaggcagaggctacagtgagccgagatcgcgccattgcactccagcctgggcaacaagagtgaaactccatcataaaataataataataatgataaaatttttaaaaagaaatgtattatgaatctaggtcagatttagaaccgtctgaactctaggtcatacacaatgttatagttcagtggttgatgccttttcactgttcactgtgcctgcgggtcccaccccacagcacacagcacacgcctcctacggcaggcccggcaggctccccagacaccaccactgacagccccttgggtctcacatcacactcatgccaacatacacacaaagacgtgtagcttcacatgcatgtaacggagcaacraaagaaatgtgtctgtgctgctctgcccagtgccccttagagaatgttccaagtcggcaggtacacatctgcctcgttctttaaagctgcagagaatggcagtcaataggtgcgccatatttccttacgccctcgaggtggttttcatatttccagcaaacatgcagtcacctcggtggtacacagggcttggctgcctgcccatgggctagtatgtccatcactcagtcctagtaggtgcacagagatagagttttatcaaaatcactagcctcagaatcacaactccgttgaatcctgctcagggctgcacagagagtagtgtggcgtctggaggcccatgggcttcagttagctggtacagaagctcggcaggcctggtgggggttccgccatgcttgttccaggaccacagatggacctgcctcccagactcgctttctgacctccactggctctagacacgggccgtcttgacccagcattctgcttttgaccattcaaacttaacaccaatcttgatgacttcctgcaacctccaatgatcatactgttcccatttctgttattttatgctaaactcagcccagggagccaatgccaggctttgccgtaatcacacccagcctttcataacatcagttactgatcggagtactcccaaaggcggcacacctagaacaagagctatccaaatgcaccccacccagaggccacattctagttcatggcttaggaaaagcaaatgttgtaaagggacagaggctaaagcagacattatcgttcaaaagtaacccgtttccacctaccccatgtgattaaagtgctgctgttaatttcctaccatgtgctggtaaaattataattatctttagttttccatcttcaacacaagggacttgtagtatttaaaagtgcatttccaggtgcctgtaatcccagcagtttgggaggccaaggtgagtggatcatagaggtcaggagttcaagaccaacctggccaacatggtgaaaccctgtctctactaaaaatacaaaaaaaaaaaaaattacctgggtgtggttcatgcctataattccagctactcaggaggctgaggcacgagaattgcttgaacctgggaggcagaggttgcagtgagccaagatcgcaccactgcactccagcctgggagagagagtgagactctctgtctcaaaaaaaaaaaaaaaaaaaaaaaaaaaagggcagttccacagagctgctccctggaactccaaagttaatgaaagacaagatgctgtgtaaacagtggccacctggcagctccagggctggggcccagatgtgaggatggtgaggcgtcaggctttcatttcccagcttactttctgcagttgcaacaacttgcgaagatgcagatatttccagttaagtgggttacagggaggcagtttactcaactatagaaatgggaaataggcagacatacacaaatgacgcagccgccstgcttgtgagcaccgatctgcaccacagctatgtccgccctctgccatcccactggccaggtggccatcactccrtgactttcatttgttccccacccaacacctccccctagacaccaaaagcccctccaaggagcaactgctcggtgacataaacagtgcatcaaaatgggaggaaccagaaaagaaaagatatcctgggtaggaacttgccctcctctacataaacacagaattggttgcctgtcatccccactgagattgtcagaacttctattagttccagccttttctaaaaaggaatggagacgtagcatttatgaatttggttatattcaattttctgataaattagagatggtttcgtctcctctttctaggggaaacatatctttagtaactgagcaaatgctgtccacagwgttattttataattttgaaayaactccacagagttattttataattttgaaataactccacagagttattttaaaaagtgttcgttgagacctagtctcctttgaggaatacatgccacaccaacaygcgtcgtgttgtgggaagtcccccctcaataggaccattgtcctctatgaggactgtccaggacttcagggatgttgcatttgcacaggctgcagtgtcratgacttggactcaccagatgcagcctcagtgttccctgtggctgtgtgtaggtttcctctgcaaagcttgaagtggcagacatgacctcagattgagttcttttatggaactctcactgtctttagtcttttatactaaatcrcatctcatttgcaggctggcagggtttctttgcagaggcgcctctttcaagaggcacatgcgttctatttagcctaacaggtgctccctcggccactgcaatgaaaagggtacaacaggcaaatgaagaacagaaagataacaggccagttcacaccacgagagacagcagactgcttttaagctttagaaacatgcatctccctaaaaaagcctagccatacattcttttcatctgtttgtgtcagctagtccctgaggacttctgcccaaggactttccttactccagttatttccacccttgaaaaacataaaatcaaccttgtacttctaaaattgcataatcasaacttcctatgaatcatatatatgacctcactgaattcaaatgagtgataagttattagatttgggggagggccggggagaaaggaggttgcagtttcaaagcccttcacagttatccattctaaaatagtgatctgcatgtcagtctcctgacctcagctttccctaagggtgggctctgtggtgagcttgctagcaggagtacagaccttgcctggaagcggggtctcagggagcccggcggagcctccactgggtccttcccggggtggttgccagcctgactctgggagcgcctgggtgattcctccttggccatccctgcgcctccccgaccctgttgtgtttgccactgagaaacagagaggaaaaagttttgatcgtcattttgacttagggttcccgcctatctgggtttcactgccagtggtctcagatgaaccctgagggtgcattttctccttaagtcgtgcataaccctcagcctcccccgagtcagttgacctgttgacctgccgctgggaactcccctggaaagttttagctcattgctttggctcttggggttccagctgcctcagaggaatcctgagtgcttcttaagttgtcccccttccccaatgggttttctataatgcccagtgcatttcagatggttcaaagtgcccatgctgtcttggacccttcagcagagatggcaacacgtggtgtctggggtgcttgttttgtttgctgaggatgccacagcataggtgtgtgatgctcgtggcccagagtgaagctcagatttgacaaattccagggcaccctctgagctggccagtctgtggctgtgctcacrgctcccactgagtgtccagctgccagctcctgtcatgccaggtacttgaggattcctagcttagcttatgacgtggcctctaaacaggacctcatttttaaaatcacagaagtttgtctttacttttgagtcttcagctccacctagcgtgagagaaagtccgggtccaaaccacaggaccacaacaacacacacaaagtgaagcccgtctcarttcagtctaaacaacatgactttcagcacacctgctcctgggtgtcaagataacctcgaaagtaatcagagaatggacctttcttatacctgtggcatctggcattctgaattttgagagctgamccatgcatgttctttaaaagagggaatacattgctagatttttagagagctttactcttctgtccagatacctcatgatatgactcaatgataaactttttctttcaaaaaatgttcaagggaatgagaaaacaaaacttagtgttatagttgttttctatttttgaaacagggtcttgctgtgttgcccaggctggagtatggtggtaccatcacagctcactgcaacctcaaactcctgggttcaagcgatcctcccacctcagcctcccaagtagctgggactgcaggtgcctgccaccatgcccggttacattatgtattttttgtagaggcagggtttcactatgtttcccaagctggtctcagacttctgggctsaartgatcctcccaccttggcytcccgaagtgctgggattacaggcatgagccaccatacccagcagagattttttttaatgaagagaaaaaactctaacttaagaaaccttaatgcgtctattttggtactaaatgaagattttcaaaacctaccctgggagagagtttcaacagttggttcaggttgtcaacacctgaccccacgatcaatcataaaagcaacccgacactcatatcttctgtaggagaagaggtgcccagcatcctccgcaaatgatccctgctgaaaaggggaacctgcacctagggcagcctccagccctaatgactcacgtggaggaaacgtggggttagaagaacagattgtacaacaccacgggggtgagactgactgcagcccaccacaaagaacatctgcagcacagatgacccagtgtcttcaacaaccacaaaatgatactaaaaacatagaaaggaagaagggactattgtgaattaagtgagaattcagaggcatagcatccaagtgttatatttggacttttttggctcctggttctagcaaagcaaccttaaaaagacayttttgagacccaagtcagggaaaattgagcacagactgggttaatacatgactttaataaactgttgttcattttgtgagatataataatgcyattgcagtccctttttggagttatacatcagagacaaaaattaaaagcaaatatctttcttgcagggaagccgaggcctggatggctatcaagggcctgatggaccccggggaccyaaggtgagcccgtttctcatgtctttgccacttatggtgtctcgcccaccctggctggccttactcccctcttgatggtgtcctgtggaggcatcccctgccctaaaaagtwcaagatccccaaatacacggcctctgacactggacagacgaggtggatggtgacctacgagccacgtgtgctccctgccagggagaagggtgccacctgccactcagggccacgtaggggtgcgctcaggcacagaggaagccagcagccctggggaaggcaggccttgtagtaacaagagggtgcggtgcccctggtttccaagggaggatgtggcttgtgtgagtaattcctgggcttgcagggaggggagaccattaggtggaagaccaggtgggtgctgctggtcyagctgagaggggaacgcacccgtggggaacctgggtgggggcacatctggagaggacttctgagccgggtgragctcaaagaggtgaaggtggtgcgcgggatgctgccttatgacaaatgctgccttacgacacagatggcgctccacgggggtcctgcggccgcatcatctcccagcccaccctcgccaggcggctcggctatcactacccaaaatgtaatagtctgaactacagaaagcacagtctcctggcattcgacaaggatttcaaaatgagatgagcccctgcctgtcttgttctctttgggcacctgtggctggtggctgggatgccaggctctgccaccctagcatggggatgctgccccaggcactgtctgtggttccactggttgaaatagctgctctgccagcctgacggtccacgctcgggtttcttctttggaaatatgtgtactgtcaaaaactccaaaaggctattctcacatcctrtttttctcttttctttctctagggagaagccggagacccagggccccctggactacctgcctactcccctcacccttccctagcaaaaggtgtgtgaacaatttcacctgcatagttcagcatcgcatacacattctctcctgttagggacacagagctatgaactttcaagacagatattctaagcaaccctaaaacttaaagtataataataataaaaaaaataaaaaataaaccacgaaatttagaacataacttcatgtacaatttccctcatgcttaaatgtgtcacagggagaccttcatgttgcctgtgcctgagacagtcctcaccacctacacgtgagaaatcccctccgttggggaattctttcacttctgcttaacttgtagagttctagttctgccgtctggactatcgctgaagatatccagggcagcagccccagccgccttcggattttttctccaaatgcaccaaggttcttaagccctctgcttgccagcccgacacctggaattgatcataactcataaccagtgaacagtcacatgctttcaggcttcaaggcaactaaattcccagatatttacacataacaaccactccccactgtcacagttgaccttggagtgtaaacgaaggactttgcgcatgtcgtcactaatgctcatcttgttattaaggctcggcttccaaattggcgagatcatatggaaatctgatcctagtcctgcaactagagcacttgkctctgaaccttgtagaatgcgcatccttctaggttaaaaaaaaaatgtttcgagaacctcctcctgataatcgtgcgtatatatctttgcggatcattggcccatgttatagtcagctctgtgaggacagacatttcagcccrtcttgttcactgctgtattcccaatgcctggaacaggacaggcacagagttggagctcagcaaacgcctgackgagtgacgacgtgcagaaacwtatcagacaggcattgtgaagggtagggttttttaaatacagacgctctggtgtttacctcttgaactcagyaggtcacctggtctccctgtcctctaagcctaggtgtcaagaattcacctccctgcttcgaagcgagccctctgtcagtttrataatggctttgcatgtcttcatccaatgctgatcaaaacrcaggacagaacagggccatgggcagtgcctccaggagcccctgagatgtctgtctggggaggcgtggagccgtgaatggggatattttgaaatccatgctcagcttccatgatgcccgtaactacgaagctggcatttcctgcctcatccatggcgcacacctggctaccaaacctgagacccactaaaaagagccatgagcccactttgacttgactcattattaataattttggtaaaaaggaaatatgctgtttgagattttaagaacataatttttaagttaatgctggcgatgtttcttttgcattttttaaaaatgttgctgactgagaacccaactctcaccaacccctcccttctcaccgtactatattcctggaattcacactgcaaaggcgggtgctttcaaaattcactttttcccacaagcggattcagaaatgcggaggttgcctgccgccttttctacyggacaacattcccgagttattggtgagctggaatgtgactgacttgcattccagggtttcttaaagtcaaaggttgactaaccagcagattccctcagggaaaagaggcagtaaatgtatctttttcaaggtaacattgcatgaacttgtcaaaagacaaaaaggakagaggggtttgtattaaaagaaatgattccaaggtacctagaaataaaagtaatcttgctattcttccaaacaagtgagaaggtctgtggctttcaattttgtgtctttttatggaatcaacaatggctaacaggwgtgtaggtcacactgtgtgccaggcgatgctccaagttgtcctagttgtacttttcagtgtgtttacccctctgggtgrccctgtgaggtggagatggacttggctgcktttactgagggagagatggaagcgcagggcgttgagttccttgcccagggttgcctttaagtggaggagccaggttcaggcccagggcctctggctgcggagcgcagccccctgcacactcggcacgaagctgcccgagcaggagacgccatacacggaagtcaggccttctgtcccttgcacgtgsgacttcagygtgacgcccagcaaagccctctccttattttaaggaacttcgtaagacgacatgcagagtgaaagctttcctagaaattcctaatgcctacatgataaaaagtcctattttcttctcattcttctcatctttcccaattatagtctagaaaaaagtgtgttctacagtaaagcgttgctatttacacagcaaaggaacatagccatgccactttgtctttgtttgttcaggggtgaaagtttttaaaagccaaattttgttatgcatccagcagacagggatgagaagagcctaatagggttaaagctggggctgaggggcagagtggggtgcagggaagtgaggcctcctcgctcccaggccwccagcagaattggcaaccacattagttccttctttattcgagctttggactcacctacttcctcacccggttttcactaatcctgttcccctgctggagaatgagccccttaaaaagagagaccaccccatgtattaatcatcttaactcctcatcaggccgcatacagcatatggagcatttggtaaatatgtagtcaatgaaaaagtgaacgccagctgcgatccgtagaccacggtcttgttcttactgtgggacttgtttcccttccaggtgccagaggtgacccgggattcccaggggcccaaggggagccaggaagccagggtgagccaggagacccgggcctcccaggtccccctggcctctccatcggagatggaggtaatgtggcttcataatatcaacaccggagacccaaagcacctgcactcaggtcctagcacacacaagggagacttcgttgacgacgtagctatgtcgttgttacttttccccactgactagtcttagcagctctaaggagccccgcacacatgctttggacaccttcacagaaccctcgcacatatgacagtaactccccaactaggttagatggtgccacgatgggtaactggcatgcttccacctgtgggttgggaagagaacggagaatcaycaggtgttgttgcccagtgttgatcacaactatcaagccattatttgaggggcaaggagaggggtgtttttaatgttgaaamaggataatgaactataccaatggcttctacccatcggagttattgacggggccatgaagcccgctagtgccccagtgggcccctctggacacgaacacaaaggcagcggtgtggtatgggagactcacgctgcaggtgaatgctgtttggtttcagatcagaggagaggcctgccgggtgagatgggacccaagggcttcatcggagaccccggcatccctgcgctctacgggggcccacctggacctgatggaaagcgagggcctccaggaccccccgggctccctggaccacctggacctgatggtgagtggagggaaacaaaagggagggtgtagcctaatgttcagatgaagcccggtcccagccggatgttatttgggattctctgctaaatgactctgggaacgaatccagtaggccagtgattagggtgcagtggatccaggtagattagggtgtagtgggtgctctctggggtccacgcaggagctggggatggaagctgaagccctgtaagcctgtgagtatcacagccccgtggatgccacacagtgaggtttagttgctgcagcttcggtgaaatccatccttcagcgaaacatctgagctgcgcagtctggaaacagatgtgagctgacattgctgcctctgtgtcggggtgatacattccacaaacctaatccagggtgagggctcacccttgactggcagcctctctcctstgttactccakcacgtttaagccaccttgataatckgccttctcagcccgtgcacagcmaaagctacaactgaacaggtgagagtagctggtgacaaaaagagatggctgcattatctgcaaaaataagtgacagccgtccmccaaggcccagacaaatgcccatgaaagtcaataaagccggcaggcacaggagtgtggacccacctgccacccagtagtgcatccctgagtcagcaaagatgctctttcaggttataacgttaggtgactcaacttgagttgagaatgacctgtctcaggcagcagggaaacatgcagtcccgcccggagcttgctgtcagaaaaggctgttctttcagcttcagcattcagagarttatgctttaaagaccaagcttgtccaacccacgggccacatgcggcccaggacggcttcaaatacagcccaacaaaattcataagctttttaaaaacatttttacaattttttgtagctaatcagctgtattagttcgttctcacgctgctataagaacatacccaagactgggtaacttattaaaggaaagaggtttaattgactcacagttctgcagggcttgggaggcctcgggaaatttacartcatggcagaaggggaagcaaacatgtccttcttcgtggcatcaggaaggagaagtaaggagtgaagaggggaaaagccccttataaaactatcagatctcatgagaaactcactcactatcgtgagaacagcatggtggaaactgcctccatgattccattacctcctgtgaaccaggtccccaccatgacatctggggattatgggaactacaactcaagatgagatttcagtggggacacaaaacctaaccgtatcaccagctaacattagtgttagtgtattttatgtgtggcccaagacaattcttcttccartgtggcccagagaaggcaaaaaattggacactcctgctttcgatgttgtgaaatgcctaataggaatatttcattctctcacaagagtgaatataggagacattgggagaaaataagaggtcatagtctctttctgtgtgacgttgaccaaaagttaacagcctcttctttccaaagtagtttactttaaattccctgacattgcccctaataatctcttatagcctcctaccttcggggaggaaaaacaccatgtttgctagtggacagtgtttggtttcagtaacaggtcaaagtctctgttttgtttgtttgtttgtttgtttgtttgttttgagacggagtctcgcctgtcacccaggctggagtgcagtggcatgacctcggctcactgcacgctccgcctcccgggttcgttccattctcctgcctcagcctcccgagtagctgggacccaggcgcccgccaccgcgcagctgggaccacaggcgcccgccctcacgcccggctaattttttgtatttttaatagagacggggtttcaccatgttatccaggatggtctcgatctcctgacctcatgatccgcccgcctcggtctcccaaagtgctgggattacaggcatgagccaacgcgcccggcccaaagtctctgttttaattgtttatttttggaagattacttctctttgacatatctagaaggaaaatcattagagttattagaggcaatgtcttctatttaaaaagtagtagtcacttctctgtgtctgttttatattataaagtaaaattttaacttaatatgctttctactttctcaatttttcttcaattacaaaacccacatattctcacattattttgaaaatttttaggtgcagatatttccctggatcatgaacctgccaaagagtctgagcagtgtgaactttatttttttattttattttattttattttgagacagggtctcgctctgtatcccaggctggagtgcagtggtatgatctctgctcactgcaacctccacctcgtgggatcaagcgatcttcccacctcagcctcttgagcagctgggattacaggcatgcaccaccaccatgcctggctaattttgtaattttggtagagacgggggtttcactatgttgcccaggctggtcttgaactcctgagctcaggtgatctgcccacctcggcctcccagagtgctgggattacaggtatgaatcaccacacctggcctttaatttttttcattatcctggactgctgtgataagagctaggtttctatgagcattatatttcctaagcaaatggtatcttttgagttttctttttctggagcagaacatgacatgttaaaaacaaaagcatacaaatattccactttaacggccaggcatggtggctcacacctgtaatcccagcgctttgggaaagccgaggggggccgatcacctgaggtcrggagttcgagaccagcctgaccaacatggtgaaaccccatctctaccaaaaatacaaaattagccaagtgcggtggtgcatgcctgtaatcccagttactcgggaggctgaggcaggagaatcacttgaatccgggaggcggaggttgcagtgagccaagaccgcacctttgcactccagcctggggaacaagagcaaaactccatctcaatttaaaaaaaggaaaaaaaaatccactttaaaraackgtgatcaaaggctaacrttgccattattcctgtaactaaattccattttgataaagtcacagcatatgccatcttgcttttcaagtcttgcttagtaaatccgtggtttactagcataagtcaactgcgaacaatttaatttctgatctgtagtgtgggctgatgaggaaagtaataaaatgaatggcatcagatcaatgttagcagctaaaaatgttaaaagcatacaacttaagtcctctaattatatatattacccctgtgagacacatggtttccaaatcaacatttttaaagcaagttcttatgcaaaaagtagtccaccataatggcctttagaaaatgtgtgtgtggttgtagtttagtaggaatgaccttgattcccatggagttctctgacttttcccctggaatgaaattgttagattcctctcttgttaactacatttcatcctgttttataggttgctactgatgaaaaccagagtttttagtcttttgcagctccagtaaaatcaaaccacgaagacagttttctttctgggtgaaatattttgcttccccctgttctagttcagttagctgaattgagttctgggaagttctgttccacrtagaaaaagtcaaaataggcctggcttgtttggccaggggctctttgtggaaatcatgttgcaaacatctaagaggcacactgctattctataggacttatttaaaatgactaatatattagagaaaaggagagcagcagggggcagaggaaggctstcaccctcagagagccactgtgtgcctttaggactaaatttgcaaagcatccagtgcttccattgtaaggagcgcccacaatctctttgtcctgaatgaatgacgtgtctcagattgacaatggtgacatctctgaagtgtgtgtggttaaatttctctctacctgcgacactgcacgtctcatcacacagagggagagcttggagacakagaacaaagctcacaaaagtccacaactgaccggacacgcagctgacctggtcaccggtcaccctttgtccccagcagtgcggggtgcggccgcctctcctcctgagacgctgtcttctcccctccactcccgggaaatcccactggcccccgacatctctcccctgaagtccctgcccctccctgcactcccygccggatgaactcgtcctccacatgaaagtacatgcagtgtgtgctggtcactcgctcgtttcctctctggccctgttctgtgtgctgagctactaacagaaaccgttaactcgacacagagtcaaccctatgcacgtgtctcacaaatgcctcaagctctccatgtccaaaatggagctctgggcctcctccgtccccaccccctgccaccccacagacctctcccttggtcctcaccctcctgcacaaacccgggagctccagcagagccctgggctactctgcctacctcacccattctgtactggctccctcacaatcctggcgggtcctccactccagtgctgtgtgtgcccttgctatccaccaccaccgcccgcgtagcctgctaggatggcacccgttgttccttccctctccakcctgtcgtccacacggcagactcacatggcagaccgcgtagcctccctccttgatgccctttaatggcttcctactgccctcggggtaaaagccaagtccggtttcttcccctccctttgtgcaaatctgcccttcactcaccactctgcgggcrctggccttctgcctatttcagggccttttagaaaccctgtcctcactctggagcattccctcccgctccccacttcaggggctcctttttattctttgggctttaattgaagcatcacttcctcagaaaggactcagctgactacccccaaaacatttcactgggcctctccctgctgcttttcccctgttccccagcacgggccataatttgaaaatcckcrttagtgtgtttcctgcattgtgtgtttaatgtgtgtctccacgtctaagctgtaagctccatgagagtccatcrgtttcatttccagttgtatacacacagcacctcgcacacagcctggcacagcataggcacgggataagtgtttgatgagcgaatgaatgaatgagctatggtaaacgtgcagtgagcaaactacatgggacggtatccatgtcctcattctcatagacatttatcctcacctggcagttctctgacttgcaaamtcccgtgctcttttccaagcagatagctgggttctttaaagttggagttttctcaccttcctgtgtgtaacggcctcatcccctgctcctctcaggttccatgtagtgtgtatagcaacatgccttttaatttgctgggggagtgccatttgcccattggagctctggccctattatttaacagtgaggaggacagatagctgcagggcacacctgcagagcctgcccccagcagcagcttgtgtgtcytgcagacacacaccctcctcctgccacgagatggcactcttcttctccagtgcgayggcgcgctctttgctggtgtgaagagcaccgtgtttcttgcaccgtcatcatcagggatgcccccgccgggatcattgagccctgcaggagctagtggggagaggtttacaaggggaaggtggtgggcgaggtcatccaacatggctgaccatgctgaatccagattggccacaacatttaattagcataacagttatcctaactccgtgtgtgtgcatgtaaggcatgaaagaggaaacagtgttctggagggatgcacacgtgtgcccccattcccatatcagaaaaagatcaaaatgggaaactgagttcatcttttttttagttttttgggggggaaccagaagtgtgtagcagtcttggaatccaagttacatgatcaaaaaatcaaaacttttctttggactcaatgtttctcaaaaggaataattgttatccctatagtttaatggaaaaactaaatttgcagactcttatatttctttccaaccctgaaggctatcgccacaaaatagtctaagttttcttttgaaaaaatgtgcttttgtttatgaaattgggtttatggatcatttggggaggcttggctgaaagccaccctgggctgggtgggacaccaggcgtctctgtggtgcccatgccctgtgtctggggggaccctgggcatccttgatgctggtgcctcacaactgggtgggatgccgggcacccatggtgccratgccctgcgtctgcgtggaaccccaggcgtccgtggggctgatgccctgcgtctgcgtgggaccccaggcgtccgtggggctgatgccgtgcgtctgcgtgggaccccaggcgtccgtggggctgatgccctgcgtctgcgtgggaccccaggcgtccgtggggctcatgccctgcgtctgcgtgggaccccaggcgtccgtggggctgatgccctgcgtctgcgtgggaccccaggcgtccgtggggctgatgccctgcgtctgcgtgggaccccaggcgtccgtggggctgatgccgtgcatctgcgtgggaccccaggcgtcgtggggctsatgccstgcgtctgcgtgggaccccaggcgtccgtggggctsatgccvtgcgtctgcgtgggaccccaggcgtccgtggggctsatgccctgcgtctgcgtgggaccccaggcrtccgtggggctgatgccctgcgtctgcgtgggaccccaggygtccrtggggctcatgcccygcmtctgtggttgtctctctaggcttcctgtttgggctgaaaggagcaaaaggaagagcaggcttccctgggcttcccggctcccctggagcccgcggaccaaaggggtggaaaggtaagaacatctgggagggacgggatgaggacagcctggcctttccaagtccctcaccttacagaaggtgaaatccrtcccccactcacgtgtttggacrtgaaaatgagcctgcatgtctctcccagcctcctgtccccttggcggtggcactgagagggaggcgcatggagccagtggtgctgtctgagcactcggcccccaggctcaccgtccctgctctccatctgccatcctcgtcactgaccttcctagcagcagtgagcctgatgctgagtcctgtgctgggttaaaagggaaaacagttatttcttaggctgcactcaggtagtgtctcaagggctcagctccaaggcattgtaacagaggtctgtagagagctctgtccatagcaaggtgctggtatagtcaccatccctggtcctactgagactyggtagagtgacgtggtttgcccgggtctcccttcccgttgatgaggaggcgaacttggaacaggtggtctttgcacctgacccttyccagtcacctcagggactctgcccctagctcgaggccgtcctctgtgaggctctgtgggccctggtgtggtgcaggctgtgctcctgctcacctctcccctcccagaacatgggsagcacttcctgggacttaccacgtcttggccgttttggcgtatgtaggatgtgcagtgcattcagcaccccgctgtggatgggcatgacctgagagcaggcaccgcaggacctggaggaagtggggcctccccactgggcatcctctgtgccctgggggagccaacccctgccgccagcatggtgctgccttgctgcccaactccctgggttcagctgtggcaaaacagaggaagagaggtcaggcaygtcttccstgctcacctatgacctttcatgaccttggcctctgaggccagggctcttgccctccctgacggctccctggagccggctcctccccttggcccgcaggcccagtggtggcaatcttcagctctaagcactgaattccttaacctccttcacactccccgcaactcaacctatgcctctgaatgtggtcccagtttttaagtatctttagtaaacatcagagtcaaattctgaaccccatgagactatgagtgaacacttgagtcacttagtctgagcctcagttttcccatctaagaaatgggggtcatagtgcccatcagaacaggcagtgtccataaagcaccaagygtgccacccagctctccccrctgcctgatacccctctccccrccacgctaagaggaatgcggaacaaggaggccctcctctccctcctctgcaggtgacgctggggaatgcagatgtacagaaggcgacgaagctatcaaaggwcttccrggactgccaggacccaagggcttcgcaggcatcaacggggagccggggaggaaaggggacaraggagaccccggccaacacggcctccctgggttcccagggctcaaggtgaggagcaatttcatcatgaagctggcaagrcactctgaggcctccccaggtgtcccgttcttgccttttatctcctaagtttacacagcttcagaccrgcaacactcatggacccaaggcatggctaaaccattctaaaaacccacataccccaaggcggactttctacaygtccactggtgagactgagaaggggcgctgctgtgggaaccgcagccgacagctcttgaaagagttcaatagggggtcaccacgtgacccagaaatgccactcctggtgtatccccaagagacttgaaagcacgtgtccacacaaacacacatacaccaatgttcacagcagcattcttcaaaataggcagaaggtgaaactatccaaatgtgcrtcacctgatgaatggatcagctaaatctatacagcatctataccacrgaatagccctgaccttcacgtgggagcaaggtgctgagccataccacactgtggatgaacctggaacatgttatgccatggggattgagacccacacagaaggacacatgctatcacatggtctctcattctattcttatgaaatgtccacacaggcaacctagaaacaggaagtcgattggtggctgccacaggtggaggtgggggtgggggtggggagtacctgcttaatgggaatggggtttctttttgatataatgaagatgttctgaaattagataagagtgatggttgcacaaccttgtgaaaatactaaaaatcactgaattttatgctttaaaacagtgaactttgtgctatatgaattatatctcaaaaaaacctatcatttttaatgtaaaggacattatttatttatcgaacattcgccttctgaagtttagcaagaactgattcagcattgttggaaggcttccttcacctgataaaaagcaagaccttttgatttttaaactgtgcacgtgcttgtgtggaggtgtggaccccacacacatcagctcatggcctttattctgtgccttatgcaaaggtcacctgcagcagacctttcttccgtggcagattttagctgaccaaagagttcaaagtgaatttcagrtgtagacaaagaaagtatactttttgttgattttttaacttaaaaagagaactctgggaaatttataaagcaaaaagttcattatttaacatwttcagcaatagaggaaaaacagttggtcaggacacttggccaaggaaacttaaaggatctgagcccacagcatggaaggaaccgcagccccgcagagctgtgttgctgacggccatgactcccaactgcttcatggcacggagctgtgcaggtgaaaatgagacccgggcacctcgctgatccatgccctaggttttctcagaaaacagataggaaaattcaacaaaaaatagcaggtgctcattttatcccagcttaaaaaggatgcgatctcygaatcatggctgtctagcagtaaaagtggctctagtattcagaaaaagtgcgtggggtgagaactgcacatataccaatggcaaagctagtaggatcctcagttgtttaaaacgtgaccgaatatttcccagaagccaaatggaccccattctgtgcccctgaaatgtctaaaaccttccaagcacacacgtccacagaacttttgttcacacgcctctggctgtgcctggtgtcctgcactgaattctatgattgtgtgtatggaaaccacactgaagtgggaatrcctgagaccatttgggagttttttggttagtttttgtttgtttgtttttattgttgtttttggtttttaatatctgtactggtagagtggcagggcgcttgaagtgtgggagtgggtcaataagcccatccctccatccatrtacccaacrtgtattgatygattgggtctggtctgtgtgtgaggaactctcctagattctaaagtaatgttgcaaagcactaaataaatcaagaatctgtggaattttctagaagggaaactcccaattacttkcaacattgcatttaattaaagcaactccacacattcccatattcttggaaatagcgtcaaccaagatatgtcaaaagctagcacagcwcacgtttgaaaacacaacgctgatgggtaccctgctcatcgtggaaagagctagacgcgattttccaggctgcgatttgagagtccctgcaggcagcttctctctaaagtatctttttctctcaaccttaacctcagtgcaggaarcaaatttctattaaataccatttattgttctcaatattatcacaaaattttatcctccatacctggaktaacctgcttggctcctaaacgactgtgktttagaggaagccaccttgacttttaattcagtgcttctcaaaaggcaccgagcccgtggatccctggggcctctgtggacacgaaggcaatgattcagctgccccgggctggggcctgcacatctgcaccattgggcagagcccagggacactgaagatgggcctaggacctgggtttccctgtccaaccacctgtggctacttccactgcattgtatttacttatttatttatttatttatttttggagacagagtctcactttgtcacttaggctggaatgcagtggcaagatctcggctcactgcaacctccacctccctgtttcaagtgactctcctgcctcagcctcccgagtagctgggattacaggcgtgcaccaccacactccactgccacactcggctaagtttttgcatttttagtagagacaaggtttcaccatgttggccaggctggtcttgaactcctgacctcaagtgatccgcccacctcagcctcccaaagtgctgcgattacagaagtgaatcaccgcgcccggccacattgtaattatttaaaattaaagaaaaggtaccatccagttcctcagtcccaccatccgcagttccagtgctccacagccactgtggccagtggccccacactggacagctggatgggggcgtatccagcatcgcagaaagtgctccttgggtggcgctcggtttggtgacgggtgactgcctgccagctgtgtgagatgaaaaagcttgccagccatcttctcagatgccctcacagtacaaagaaggaagatatttttttgtctgttttccacagggagtgcctggcaacattggtgctcccggacccaaaggagcaaaaggagattccagaacaatcacaaccaaaggtgagttcctctctggccacrcggcccctggggcactgagccttcctgtgggcacctgcctgggcagcttcacatgcaaatccctttctaggtgagcggggacagcccggcgtcccaggtgtgcccgggatgaaaggtgacgatggcagcccaggccgcgatgggctcgatggattccccggcctcccaggccctcccgtgagtagccacaaactgcrgcagctcygtcctctcttcttcatccttcaggttctccaaacaccccagaagcaaacagtattgacatgagcactaaaccaacctgtgcataggacaggctgctcattctgctcattctatttctaatgagcagaaatcagactttttaggaaacggtgaattaagttrgaagccaagctccaaatgaacatttaaaagtcaacaatcaaakaaatattcctcctggtgtaacagactaagaaccctcccccgccaaaaaaagtagactattctaaaatgggtggtggaaccctatttttccaaggtaaatcatgaaatatacaatttcatttttgcaacaaacacacactggtgttgaaggaggggctacctagtagcctgcagagaccccagcatcatttcctcaggggaggctggggtcagaggcgcgggaggcagccatggagggagacaagaccccttcctgtgcaccctccagcctctgagcctctcctgccaccacgcctttcccactgccagctctggagcattctcttctcagaaggaccttgcaaccttatttctcacgtctttttttctagattccattttcctccctctagtcaccaagcctgtacctccttaagctctttgtactggtttcctggggctgaggtcacaaactgccacagactgggcagcttagacatcagaaatgtatggtctcacagctctggaggctgaaagccgacatcaaggtgtctgcagggctggttccttctgagacagtgcgggaggatctgtccctgcctctctcccaggttcccggagctctggcattccttggcttatagacggctgtcttctctctgtcttctcatcatctgtcctctctgtgtgtctgtctctgggcccaaatttcccctttttatagggagagcggtcatattggaatgggcccatcctaaagacctcatctgaccttgagcaccctcaaagaccttatttccaaataaggtcacatgtctaggtcctgggggttaagacttcagcatcattggaggacgattgaagtcataatcctctttctcctcctcagagcctcacgcctgaattctattcrcagcttatttgcctcattccataacccatgtcttctctagttttaacgtgggtcatgtctgtaataacactcttgagtgcagtggtacaatcaaagctcactgcagcctcgaacttctggactcaagccatcctcctgcctcaacctcccgagtacctgggaccacaggtgcacaccagcacacccacctaatatttttaaaattttctgtagagatgagatctctctatgttgcccatgctggtctcaaactcctgggctcaagtgattctcctgccttggcttcccaaagcactggttttatagacatcagccaccacacccggcccacatttttacaatttaagtgcagttttttggggccagagaacacagataattctatgattgggtatcttaaaaatctcatctgggaggcaacagggttaaataagaggcaaagtcataattggtcactttagccagaagaggaggatgagtgatgattcctgtggttggaacagtctttggcctgttcagtgtcatgtggggtgggggtggtgagtgtatgtgtggtgtgtggtgtgctcatgtgtgtatgtgtgtggtccgtttgagtctggatttgttacggtagtggtggccttccctggagttggtgccttgtgaagttggtgaccaggaggtgcacctgtccagccatggggttcacccacccctgcggctcccaagcctggctgccagtcccagcccagctgggggcaggtggtcggagcagggttaggggtaggggtgagggttagggtcagggagaaccttgcagcctcagcttcccattctcggggtgtagggactttcccagtgcttgtgtgccttccttgtttggtggcatctctaaaccaagaatgtcaacttctgcctttagaaaactcgtgatcctgcctgtgccaccttccagtggcatcatccccactgctgtccactaagtttggggcatctgccctgtgatctctgcaacagccttgtgtccccctcccctgtgaaaaaaagctaaaacacaggggtacaccacttaatcaaggtctcataaatagagctggaccggtgtccctgccccgctccgtcatgcctttgacaaggaaggggctgtggtgtcagtggagagcagggtttgatttcttataagcagctgcctcattgtcatgagaacacccagcctcgtcccgtggctcagcagatgagcgggagcttatgcgcatggctgttccaccagcacgtgrggacagcaccgagccgtgccgtggtgtgtgcgcagatcacaccagcatcactgctgccagcctccccaccccatccctgcacctcccaccagctcccccccgcaccctgcagctggtgctttcatccacagggcagcccctctccattcccaatcctgtaatctctcctgacttctgaggcgcacacggctctttccttgtccaaattagcttcctttcctttaacaacgtagcatcycttaaaataacagccattttaccgatgctaaattataacaacaaaatcatgtgtttctytctccacccacagtagaacacaaaagcctgtgccttcgctgttctggagatgaaggcccaggctgatgcaggggagctggcgggtgggaagagagaaatgctcaagcatgtacatgtgccttccagaamcggcttccgtggcattgcttagactgctrcacagtctgtcactggctcctgtgacctggctgaccatggcactaggttcctgttcatctctgttgtctttctgttctggatccatagctcagaattccrggaaatgggaaaggaaacagggaagtcraggcgatctttaacattagtatatattttaagaaataaactgaattttyacacagggtgatggcatcaagggccctccaggggacccaggctatccaggaatacctggaacgaagggtactccaggagaaatgggccccccaggactgggccttcccggcctcaaaggccaacgtggtttccctggagacgccggcttacctggaccaccaggcttcctgggccctcctggccccgcagggaccccaggacaaataggtatgaaggaatcctcccttttacctttcayagtcctgagacattccacgctttcctttgtcagtgtagacgtttcccagtagagtcagatgaggatgctgttttgcctcatctgttctygcacgtacaagggatgacccaactgtgargtttctgagcccccaccagcctcccctcagcagctgaaacatgcagcctctcctgtaggactacagtgacagaggccttgcccggaagttcagagatggctttcccgttccctgcccayttcaaagccttcctgcccccaccagcaacatatacgacacaccttcacacacgtgcacgccccagacgagccagtaactcttatctgtttcaaaattgcctcactctgtccttatgtcttccycccagattgtgacacagatgtgaaaagggccgttggargtgacagacaggaggccatccagccaggtactctgggaagtgcaggtggctttaggacactagagaactctcatttggtctgctggttaagctcttgcagtrtgcgtgggataagaaatattaataatatgtgcaagccacgtttgatttccatggcacaacakagtggcctggtgagcactatacattgcrtgaatracaacctggtagagacggagagacatttaaccaawcccctcttgtcagaaatcctttttcactggaaagcaccagtgcattccaactcagctccacaggcacgtgtgctgccaggagggtccaggcagaggaggctgagcccagcccagacggtggcgaggatgtcaggccaagatgggagcctggtccagattcccaggcacacagacaaaagaaagctccaagagtgactgttcttgcaagagagcctcttagacaaagggctctcacaataccccagctggagtgtcactgctcccagccacaccaaccagaagtgcccacagccttgatttaattttgcaaggtggctgattgctgtggttcaytctgaaagtaaacaaagtcacaaaggagaagtcaaataattcattttgaaatcgcaggctatctccattgctggcagatgcttccagacaaaagaaaagcatcsacactgacttgcagggtagcagccrgattaactcggtttgcacccaggctactgccctgcaggagggaatcaattgtttgccagcacagtgccwgtttttatttgactagactggcttagtttgcattttatacgaatattttgatttcattacacaatgaaattaaacttttatttacatcagaaccaagatgaattaaatcattaagttactctgatcccagaatggtagccggtttgcacrgctcgtgcttttgcccttggggatccccaaggccgtgggactcagygtttaggattgcttgggctcatcttttctcctttctgtccccaggttgcatagsagggcccaagggattgccaggcctgccaggacccccaggccccacaggtaatgcacggagggaacctggagtgcacccagccttcctcccacatcttcacactgctgtgtctcccccgcccatctttcctctggtcctgcwtcccccaccccagacatggtcgtgtccagcatctcagcacaaactggtcttgcgcctacagggagcccactgtcatttgccaytatagaaaaaggagtctggtagctgacacttagytggggccaggctagaagagaaaattcagccatggctgcaggggaacgcccccaggggcagagatggaagcctcgtgtttaggactggaaaggggttgcacttctatgtattttctttttatgcctttccatcccaggatctaggggaagaacctacaggagaggatgctttcatttgggttttgattaacaggaaacgggaataaacaaggctagagtgttttgtctctagcacctgggaggacctgggcttctatctgctggcccaggccatctctcagcccatgtgagaaagagtctgggygcccttcacagagcccatgcctaaggccgcctgcgtgtccagtgttggcggtgcaggcctggctggccaccaytgccgtcccgcctgcgctgcgattctgctgccctgcactccagggtctcygtgggcctrtgagcatcggggaacacagagccagggcttccactcaagcaggaggagggctggaccctgagaggtggctctatgcctgtgtccatcagcctgagaaaagcaagttctctgagcagtaggaattcccctttggatgtctcttccactcggcctgtgatggggccggggaagcatgtcacttgggtaactcagtgtcacaagcaccagacacagccagagctgttctcacttgtttcttctggaactaagtccccacctatgcwagatgaatagtgcagacaggtgttctagatgcttcctgctgcacaaatcatgccctcactgcttcccgtgataaactgtagagagcgacaccagtgtagtatgaacagcaatgagagttaggaaagtggacggacacattctatgtgccctgcaccttaagggggtcttcggagtgcaccgtgatcacagggcctggggagcacaggacaaatgcagaggtatcatttgcactgtgagcagaggtaaaggctccttgtgttgtcttctgagaactgagcttgtatcttccgcgttccattagacctgcccccggtctaattccatccatggatttcaacaccgtcactcatacagcaacccccaaaatggtgacaactctgcatgtctcaggtggtcagggagaaccagaggccagcacgctcagcacacacccagactacagccgtgtgccaaggccggtctccgggaaagctccagtgatgcgagtgtgggtttctgaggctccggggctcccccagccatacccagttatttccatttcatgcccaggcccccattactgggagccccttgctggcctcccatccgctcctccctctcactcctgctgtccgcactccactttctaagagtgagggtgggtttgatcacacacatccccttcccaagaggcgccaggaacggggataaaaaagtgtggcagatgggttttgtgacatggctgaggaacctcakcccttcaattatcagaaaacacttctggagcccacacactgggccaagcaggattcaagtgtttgaaaagagtcacctcatagtcctcgtggcgtcctcatgaggcaggcratccttctycccactttacaggtgaggaaactgaggcacagaaagttgtccacggtcacacagatagaatggtagggccaaaatttatagccaagcatctgaccccacctccaaagccctcatttagagcactgtagaatctaaatattggatattatcattcttatggttccagtccgtaaacaggattttaaacactgaaaatcattctgtaagcctggaggtgctgtttcaggctgatattmcccccagcctcatcatttcccggtttcatgagatccacrttaagtcagatgccaagcatgaccatgcccatttatcctcgtggagcctgatgtggtttgtggtttatttggttatttaggtgccaaaggcctccgaggaatcccaggcttcgcaggagctgatggaggaccagggyccaggggcttgccaggagacgcaggtcgtgaagggttcccaggacccccaggtgagttgagatcagacccccattcagcccctgggttccagcgggracctgtgtgtgattcataagcatccagctctattatcttccactttgtagaagctgttttaacaaatacttgacaacwtttgcatttgtccttgggagattagaaattcttgatttttcataactgataytgtactgggtttttgcagaagctatytacagatcttgcaggaaaaaggagacaggtgtttcggaatggctgtcctccgcaacacctgtctcccaggtatgtcctcagtgttaataatgattaatattaaacattctaagggcaacacaaagttatcctctcctgaaagaacccttaaaggcataaatagccctctcacaatgtggctgcaagagcttaaggcattaatctgtatgtggaggaaaatgaggtttcccttaaccagctctggtgaggagtacccacttgcgtgtcagcatgctctggaatgcagccaggcgtctgcagacataggtgtcttgcagttgtgccacaggcgatgtgcatgagtgtgatggcactgccttgattgcaggggcatacacgtctttttttttttttttttttttttaatgaaatggaatctcgctctgtcacccaggctggagtgcagtggcacaatctcagctcactgcaacctccgccttctgggttcaagcgactctcctgcctcagcctcctgagtagctgggattacaggcatgtgccaccacacctggctgatttttgtattttcagtagagacggggatttcaccatgttggccaggctggtctcaaactcctgacattaggtgatctgcccgcctcagcctgccaaagtgctgggatgacaggcgtgagccactgtgccaggccgcacacatcttcaatagtgtttgtctaatgaaaccatggaagccattgtggacaactttccacccgagatgaaacatccttccacagggtcctgggcaggttcctgcagcctctgctggagtcccacttgtcacctagaacctgtggcacattggaaccctcttgttgctagaaagttcctccstggaatacagcctgcctcccagggagttctcaccgggctgttcctgagccacacagttgacttcctcataaccacacaccctgagagaggcggccacatctcccacagacgtctcatgaacaggcagaactgaccccgggaacacayactttcttttaatgacatcgttccatgcccttggaattctgagcaaccttctaggacccccacttatcaggattcttttccaactgggctctagaaactgaataaagcgctccccatgtctggaatatcacacagaacatcgggactgttgcgcccttaggttgaacatcttgcaaatgttcccagtgaagactaattgaaccctgcccctcccctgacctccactsagatagctgatttaagcctcaatgcagaagtgtctgtccgtccctgatagatggtatctttcggaattttgtgttgcagcccgtagggattgttccaaaccctgaccctgtttcctttcatatgatgcgtttctccatgttttgcaaaattgggaagcaggcttcctgtgtctgtatcaaggccctggtaaaaacaactctgcattcgaatgaagcaaaggaagtctccatgcctctgccccaggggttggtctctgtggttttgttgccctgctggaagtgtctaaatatttagaagtgtaacattgccactctcatgatttcatatatactaagtttaagcattcatgattttgagagaaggataataattcctgaacagcttcttgctgtgagtatgaaagttctctggtaattgtgattggagtgcccagccatgtgtgcgtgaacgccacacggggctccyctgtaggggggaatggatgggatgcacccattatcaggtgatttggacagttgcccacgtgagttgggagcctgttccaccatcaaatgtgagcccttacgtcatgaacagggaggctggggcaggctgggggtgggtggtgaytgaggaactgatcagtttctgaaacgcatgtcactttttatggtgctgaaatatactgcccttctgtcgccacatgcagaagaggataaaatgcccaattcaaggattgcaaaaatcagagagtctattccagatctaagacccacacatgcaaacccaagtgcatggctccctgggtacagtttgtaacattgccagtgaaagtcatgtctcttcattgtgagtaaatcacaccgttaaaactctgagtacggtctagctgattaacgtcaggttaatccagatcctttattctgtattccagttactcccagctcccaggcagtgatggctttaccggcccaggaggkccccgggccctgctcattggatctttttggtgggatacaccccacagaacacagaaaacattcccttttccgtatccatacataggagtgccgagcctgccgtgtacttgatcttgtcccacagaatcacctgccagtctcatcgttgcaggcttctctcctgcatgcacagcgrgggtggtggtgacctcagaagcctttccttctgagcactgcgtgactgtcagctgtgggagttcattctgaggccatgtcagggctgactgcaccgaaaaaggaagtgacctgatgagatcattttatccagtggcacccacaaaagacacaggacagctgccttccytccatccgcagatgggacttgatgattttcttttttcttttttttttttttctcttttgagatggaatctcactctgtcgcccaggctggatggagtgcagtggtgcgatcttggctcactgcaagctccgcctcccgggttcacgccattctcccgcctcagcctcctgagtagctgggactacaggyryccgccaccacacctggctaattttttgtatttttagtagagacgaggtttcaccgtgttagccaggatgrtctcgatctcctgacctcgtgattcrcccgcctcggcctcccaaagtgctgggattgggacttgatgattttcatggtcaatacaacagaggggtgtcgttcctctttgaagcgtttcccaaccgacagtgacgggtttctaccagggagatgttacggcaggcagcgttttggctctgacggccctgttcgttcctgcctccctgggattttccatcccgaagtgctgttcctcactcagcacaacctagaaggtcccacaaaaagctattctttggggcttatttgcaacgcaggggaacccatgaattatgcaaatcgaggtccaaggaggcrttgttggcttgtccaccttcactcagttttagggctggggggccgaatggcggggcaagcagaagaaacataaccaacagaacgacatggcgaaggttgtaggttccaaaaagggcgacarggacaagggctcgagctgaggaatgccttctgaggaccccatagccaaatttttgctgtttccagcctctttttgactcttctcttagaacgtcaccatgctaacttgtggtttggggcccacccatgtttccttttagggttcataggaccccgaggatccaaaggtgcagtgggcctccctggcccagatggatccccaggtcccatcggcctgccagggccagatgggccccctggggaaaggggcctccctggagaagtcctgggagctcagcccgggccacggggagatgctggtgtgcctggacagcctgggcttaaaggccttcccggagacagaggcccccctggattcagaggtgagtgccccatcggggagccgggggccccatcccagatgcacagtggcctccaagggcgaccccaatcccttccggrggatttggtaggaagcagcggtgccctatrgtgctagccatgcgtaccttctcccatggccttccagcactcctttagaatgtgtctgtcacaacactgtgactacccacggtagccagtgcgatctggccatctgagaactttgacaggtgtggattcactgatgtaatctgttgtcaagttgcatatgcctggctgtgacaggggccgtgacaggctcactgtttgtcttggcagaatctgtacaggtggtatgaagaaaagatgggccctggccatgcttagtcagaggtgaagaaggaaaatagaaataatctggaatgcaattctattggtgtaaaaattaatacattttttaaaatgtcttaatgttgtttacagtgttatcaatgtatctctatcaaagtagacagagcatccctggtttcatgagtgacaaggcacccagtggctttaagggttcaactgatgccaaatcggctttgggaacccgagccccgagctttaatgaaagatgatgccatggacagcaaatgttcacactgggtgaaccccaggctggggattgctagatcattgcaacctgccattcagtgttccaaatcaaaaatgaggctgagcacagtggcttacacctgtaatcccaacactttgggaggccaaggcaagaggattgattgagccgaggggttcaaaaccatcctgggctacatagggagaccccatctctacaaaaaaaaawaataataattaactgggcatggtgctgtgcacctgtaatcccaactacatgggaagctgaggtgggaggattgcttgagcccaggaattgtagattgcagtgagctatgatcattccactgcactccagcctgcgtgacagagtgagactctgtctcaaaaagaaaagaaaagaaaatgcgggttaaaactgtgactcggtgcattcactgtttatctgttkatggcattgtcgttagtccctgctgccaaccccagcccgaagaggcttctctgtggtgtgggaagcaggtgtcgctcccctgattctgccatcagcccacatcaggcatcctaagcgagatggaggctaggcctccactggcaggcgaacccatgaagctcaggagcatgaattggttttcggatgagcctgtgagattcctagcaaggcctggaagggttgggacccaggacaggggagttttgatgatgatgagactgatcagtgcccccagctgttgatactagggagcgcccatgggtgccacagttcactgagagagcaaggaagagcctaagatggccagagtgcatgcatgcacacacacacacacacacacgttcacggtcacactcatgcacatgcatgctcacacatgatcacatacacacatgcagatacctacacacgtgcctatgcatgctcacacatgatcacactccttacacacacgtacccacacacgtgcctgtgcacactcacacatgatcacacacgcacgtacccacacacgtgcctgtgcacactcacacatgatcacacgcacgtacccacacacgtgcctgtgcacactcacacatgatcacacacgcacgtacccacacacgtgcctgtgcacactcacacatgatcacacacgcacgtacccacacacgtgcctgtgcatgctcaaagatgatcacactccatacacacacgtacccacacacgtgcctgtgcacacacacgatcacacacacgtacatacccacacacgtgcctgtgcacactcacacatgatcgtacactcatacacacacgtacatacccactcgtgcctatgcacgctcacacatgatcacacactcacatacacacacgtgcctatgcatgctcacacatacacatccaaccctgaaccaagccagctagagcaggttgttgggtgaaattacgaggatggggaggcctcgtgctcggccatccagatctcccctttccagtcctactgactctccaggtcatttatggaagataagatgcaaatcagcgctgtctgcagaaactgaggactcggcgctgagaggtggggctctgtgtgtcagccttcctggaaggcacttaaatgagttcacagaaggcaaagtgaaggacatacgtaggtgactcgagtgtccaccatcgacctgttctgcaacccagctgtcaaaatcctgccccaagctctttgacataagggtacttctggtagaatttttttaaaacttaattacttcctgcaggcttcagaatgtttgagcatgaaaacaaatggmagcaggcttactttcgatgtcttattaaggtctttaccatgatcaatgttacctttatgacaagcttcatatgccttgttaggcagaatgttttggatggtaaaaatcctgactcccaaagcatcaacattccaagtaactacttcagtttcagttccgctcaccagtgctacaggagcascgtgcagcgggtcctgcttccattcgactggctgtgcrggacggccacaaacacacgcaggtgcaccctgcgcttctgagcagaactctcggaatgaagtaatgcagacgtccacaaatgagatgtgatttcactgagggaggctgatttttagcagttgttccttttttaacagatagtctataagtggaaactgacctgaaacattcagctctaaagaaataatcacaaagcacctcggtgcctgatttttgcaaggcagtccttgccggaggatcgggcattcgtgcacattcacccggagaccgtgctgtccacttccagaaggggaggaagggcagcgctcagaagcacgcccagactgtctccagccctgctgccccctgctgaggccatctcgcctgctcagcccccaagttcccccacagtccrtgtccctgggttatgaatgtcacctggtgtctgtcagatccccaccccattgttcttgtcaatgagcaggagtggggtggacctgccatcgctgcgaatcctttacagcctgcagygctscctgccaactcttcacaaccattagcacccactaacaatccatttcccctggagctcttcactctaaagatagaagaccaaaaaatagaagtgtcctcatttctcacagtactacaggaggaggtgagaaccgatgcatccgtgcatcttagagaatctcatttcagacctcggctttgagtgcgcctcctgctcagtcagccctctccctcgctgcaggttgacgtggtcagacagtgcgcagtcagcagcctgactctcggttctgggttggtccaagactgaccgggtcccttttgtcactgccccctcctgtgcacccccctggcttgtctgcctccctgtcctggaccagccctgcacacctgcagggtggctgtgaggctacgtgagtgtgtggactgtaaagtggtggcaggagtgtgcacctccggtgttaataatcggagagcagctgcgacaagcgtcaggctcacgaagagagggggaaatgcctgaatataaggaggtccagggagctagtgttaaaaactagaagaaaacagatgcccttagtrtctgaccactgggcaggacaggatattccaaacttaaaatgaagagaagaaatcacacatgtgcacacacacccacacacacaccatatgaagtttgaatacaaaggttagtatcctgcatgtggaaagcaaaattaaactttgagcagcagaataaactttacaatagatatgaaggaaaattcgtcagtgtatatgaggaatactaaaatctatcaggaaaatataaaactccccagaggaaaataggagcaaagaggccgggcacagtggctcatgcctgtaatcccagcactttgggaggccaaggcgggcagatcgcatgagctcaggagtttgaaaccagcctaggcaacatggcaaaaccctgtctccatttaaaaaagaaagaaagagagagaagatatgagcaaagaactaaaacttcaccaaaatcaataaccaggagaaagaaacgtagatcataatgaagaacaagcaagcggatcccccgacaccacgtttcactgcatcatgactgccagggttccattttgcttcagtgctaacgctcagtgctggggaaacactggtagaataaatgggtttagactttctgaatcagtgcgatgtatcttttaaacaacattaaattagtgtttgctttgatacacgatgtcaatttctcaggcagtttcctaaagaaattacctacgacatggacatggataaacatagcaaaaaaagaaaactccccaactattcctgacagtgctgtttgcaaaagtgaaaaaaatggggaggatgcgatggaatacattcaatgtgtccagatgatagagttttattcatgtagttattttaaatgtttgcaaagactatttttaaatgtggcaaaatgttcaaaatataatgtcaagtgaagaaaactaggttaaaactatacttatagtgccatgtcaactctgcaaatgtctagttatttataggaatagacaagggcaggaaggaaattcccagtggtagtcattaccgctgggtgatggtgtgccttacctgattttatcctttatacttctttgtgttttcctrattctctagagtccagaaaagcatgaattgctctttttacagaatgagtgtgtggagggagatgctgtctgtgatgaacagtccagagttggcccccacagctcttgtctctgattcctgcaggaagccaagggatgcctgggatgccagggctgaagggccagccaggcctcccaggaccttccggccagccaggcctgtatgggcctccaggactgcatggattcccaggagctcctggccaagaggggcccttggggctgccaggaatcccaggccgtgaaggtaagacyccagccctcccataaacgagtggggtcctcactggtcctgccaagagaatgagcactgtcttcttgtggagctctcaaactctgttccatggaaccccttaagaggtgcaggggttcccaaaccagaacatgtatttcacctaataaggagacayaaacagcctgagacatcggctcatcctctgtacctgttgtatatattaaggatctagggaaggtctcatygggaaaaaagaaaaagaaagaaattccccctacaaaagttcagaatcactgctctgatgtggagaggagaaatggttttatgaaagtgcagggtgtgggttggaaaggcaggtggctcygtcarggaaacytggggtagatgggctggagcagaggagcggggaggggaggctcggctgcatgcccaccacacaggccaaggcaggtggcagaggtggcccagaaggcaggcagggcacagcatccatgggcattgcccaccactgcccaggccgctctcccacactcagtacagccagttcccagactcctacacttcacggtccagggaaactgtcagtgctggttggaggaatcaatgtactttcccccctttttgttttgtccagaaaaacagctttttaaggaagtgtatgtcaccaaaggacaccgtaactgtaaagtgggaaagacgcagttgcttaataaggagttgtctccatggaaactctcaatcttactatagttctctggtttgccacagtcaggcaacagctttgtccaggaccttagcagatcttggtagggaactgccactccacttgaagatacacactggcttcccccatgtggggcctcgcctgtgtccaagagctgggggctggactcaggtagggcccgctcccctattgccgcactagccactggcttcctggggtagcaaacctggaccggaggttcaggctcctatctcagtatcgacagggccgtgctggttctcaactactgagaatcagctgaacacagcgtcgtgtggtgcttacgagacccatgggaaagcctgtcctgaactaaagcctacactttaggtggggagagagacacacacattaaaaggctcccacttggcctgggcaagccagcagagtgacaaggccacgcggtccccggtgacccagaggaggcggggacaggcaggtcagagcaagcccaaggggagaagtgcctggtgccagcggggagaaggctgggactggaatgtggggtgctctctaggaaagggggaccaccccagcagaggcaggccagcgggggagaaggctgggactggaatgtggggtgctctctaggaaagggggaccaccccagcagaggcagaattgcccagggaacactttggagcctgtgatccccaaaccggctggggaagagagcctgatttgagggggctgggggtttagataagaagattgagccaaaggttgggagcagtgaatgctggagctaaggagttggarccccgaggcagagggggcctttgggagtttttaacagagaaatgcattaagaagggattttagggacccagcaggcagcccttggacggcttggagtcgggggaggcgggaggacagctgtgggcgggagctgccaagctcacgacagtagcagtgatgagatgggagcacggagaccagagagggcagcagcagcaaatgggcagctggagggtcccccgggactaactccgggctggagccagtgatgttcgcgaggaacaggccagctcttgactaaccccagtgaccatgccccagccagagctggcaaggcccccactcacatcagcatccacacagctttgtcccttggcttctgaagactgcagtgggaaagccatgctggctggcaccccgccagcacagcctcaaccaacctccagatacagacctctccagaaaggccagccccagggtcccgctcyggccacactttggaaactcaccccaacatggtggttttccactttccttctaaggagcttttcttactgaacactcratgccgtaaaagcagaagagaaatttcccctrtgtgtgtttgtccaccctgtttgatttgctcctyttcctgacaggtctgcctggtgatagaggggaccctggggacacaggcgctcctggccctgtgggcatgaaaggtctctctggtgacagaggagatgctggcttcacaggggagcaaggccatccaggaagccctggatttaaaggaattgatggaatgcctgggacccccgggctaaaaggtaattgtgtgactgtgaccagggatcccttggcggggaggttgrgtctaatcaactctgacctgagacagctctgctgggcrcctctgtgggccgtggggctggcctcacacttctgcagattggaggccttgggactctcctgacctaggagacagcagcctcaggacagctggttaatgctgcttagacgcgggtgggaccaatgtgcctcacaaagccagtttatgaatttaccaagacaaactgctcctgcctgggaaacatcgtcttattgtaaatatcaccatctgcacagggaaatttgtggagaggtccactcaggggcctagattcagatccagaggttatttggtgaatttgaaaccaaagcaaagcaaagtggttggttacagggataggtttatttcagcacaagcaggccaatctagaagcagagccctccagcccatgaacgttgctggagacacactgttcttccattgctggagacacacagttctgtccttccattgctggagacacactgttctgtccctccgttgctggagacacactgttctgtccctccgttgctggagacacacagttctgtccttccrttgctggagacacactgttctgtccttccgttgctggagacacacagttctgtccttccgttgctggagacacacagttctgtccttccattgctggagacacactgttctgtccctccgttgctggagacacactgttctgtccctccgttgctggagacacactgctctgtccctccgttgctggagacacactgctctgtccttccattgctggagacacactgttctgtccttccattgctggagacacactgctctgtccctccgttgctggagacacactgctctgtccttccattgctggagacacactgttctgtccttccattgctggagacacactgttttgtccctccgtgctggagacacactgctctgtccttccattgctggagacacactgttctgtccctccgttgctggagacacactgttctgtccctccgtgctgtagacacactgttctgtccctccgtgctggagacacactgctctgtccttccattgctggagacacactgttctgtccctccgtgctggagacacactgctctgtccttccattgctggagacacactgttctgtccctccgttgctggagacacactgctctgtccctccgtgctggagacacactgctctgtccctccgtgctggagacacactgctctgtccctccgtgctggagacacactgctctgtccctccgtgctggagacacactgctctgtccctccgtgctggagacacactgctctgtccctccgtgctggagacacactgttctgtccttccgttgctggagacacattggtcggtccttccattgctggagacacatgggttggtctttccattactagagacatatgagtctgtctttctgttgctggagacaccttgacctctccttccggtgctggcgacattggtctgwctttctgcggtcctgtgtcgcatctccatgccaggtgcagtgttactgctgccttcctttccagcgtgctcctctgcctttgtcttgatgggcctgtgggccagtgaacctgcatcatcttcagatttccctcctagccttcctgcctgatctttgtgtgtttccttgttgccaatgtccggtctgaagacaggctgattctggaatgctgtctgttaacagcagaggtcaacagagagaagttgcttagaagatggtgtccccggaaatccctattttaggttcagaatcttctcacttgagttacattgccraaatgttasggagacgtgagactgaaatgtcccatgcattttattcatgtctaacccagcacttttctcttttcctcygaaggagatagaggctcacctgggatggatggtttccaaggcatgcctggactcaaagggagacccgggtttccagggagcaaaggcgaggctggatttttcggaatacccggtctgaagggtctggctggtgagccaggttttaaaggtatgtccctctcttaacatcctccttacctggtcatggtggcatcctccttaccctttcttggtggcataacattgcccagaatgaatttttgaaaacccatgcatccaggaaccctaaagctagacaaaacaaacaaaatgagctaacaaaaactcaaaggctttatccctgcctcaacacactgaccatgtgataagggaataatcctaaccaaaggaaactcttgagaaccaaaatgattccatcgctaagaaccaaatatgtcatgaaacatattccaccatgattataccgtggtaaacatgaagagggggcggtgaaaagcaggggacaggtgagttccmagagaagggagtaccaccaggcacaggaggacacagctttccaggtggaaggacataacacggtgccagagagaacgtggtccacacatgaggtgggttcaaaccctcacgcggacaggcatctcaagaccccccacgtaaggcccctcgttcattgagtttattactaacaagtcacattttcatgacttctgttcagatgcttttgttctgaaataatcacagtggtctctaaaaacktaatgactaagagtgtgtgttggtgaggaggtggagaaatgggaaccttcacaggctgccagcaggagtgtaaaacgctgcggccagtgtgccaaacagtttggcagttcattaagaaactaagcatagagttacccagaagttctactcctagatgaagatcattgaaaacataggtacagacaaaaatgtggacacaaatctcatggcagcatcctttatagcagccrtaattggaaacagcctgaaaatgcatcgactgatgaatggatgagtaaaatatggcagagctgtgcaagggcacattcagtgctgaggaaggatggggctctcagacatggcgcgtgggygagccttgagaacactatgccacgtgtcgtctgactgcatgtatatgagatgtccccagtaagcaagtttacagaaatgaaaagtggattcgcagtttcctacacttgatcttagccaaaaggccgagaagcgatggattcgcagtttcctaaagctgaagggttaggggagaattagggcatggctgccagcggctccagggtttcattttctgggataaagtgttctcaagttagacggtgctgctygctcacagctctgtgagtacactaaagttatgtaattgttctgtttactggagcgagttgtagggtatataaattatacatcaataagctgttttggaaaaccttaattactcttcagacttacagcttttacaaattttcagcaaaataaaaattgcaatctagggtgctcattttttttaagatttttactcacacttgtgctttcaaatagtcttcctgttagcagagatttcaggctatttcaggcaaaaaaaaaaaatgacattttaagattaagtaattttcagctccatggtaattatttcctcgagcctccttagggtgaagttaaccatgggggtgtctgtccctccactggtgggcacgctctgtggsgtcaggaccaatttatgattttgatcccatcagcctctagcctagtactgaatacacagtaaatgcttagagactgaagctcaattattttcactgagccagatttcacttactcctccagtgagcatggattccggggcatccccagcctgaactagcacagtttcccgcccggcccgcagctctgggcccctcccctcctgcaatttctcagctcctcagaaccccccggagacctcccttccatgcttctcctccctgtgaaggtgcctacaggagggcacggagctggcgcctgcctcacgggccttcctgcttgtgaccgaggtccatcatggtctcatcagagcacacacaacaaaatgaccttctcacaaagcatcctatgggagtcacactggctttgaccgctccctctgcatctgctggcaggcacgtccccctactgtggtgctgtgtgctcagtgacaccagccccaggcccaggaccctggagccacccccaactccaactactccgatggacacaggagaggcttctccggcrcccttggtctctctccaaggcttccctgcttgggggagacgtgcagcccyatggctcagggaccaggccttcacctgtgttctcctgcgtggtctggagcccccagaaaatgacagcactctrttcccttccaggcagccgaggggaccctgggcccccaggaccacctcctgtcatcctgccaggaatgaaagacattaaaggagagaaaggagatgaagggcctatggggctgaaaggatacctgggcgcaaaaggtgaggcttctgacctgcagccaggggcccctagtycctgccgccccagcccgcaccagctcgtgcccttctccgtccccagagacgcccrtgccctccacctggctttcttcrtgcttttcatctctgggcgccctgtgtgtccatagctggcgcagggttgttctctgatgcctgagtaacctcggtttcccatcttaagatttgcagcactggccgggcgcggtggctcacgcctgtaatcccagcactttgggaggccgaggcgggtggatcacaaggtgaggagatcaagaccatcctggctaacacggtgaaaccccgtctctactaaaaatacaaaaaaattagccggcatggtggtgggcgcctgtagtcccaactacttaggaggctgaggcaggagaatggcgtgaaccggggaggcagagcttgtagtgagccgagattgcgccactgcactccagcctgggcgacagagcgagactccgtctcaaaaaaaaaaaaaaaaaaaaaraagattcacagcacgtaggacagcaaaatgcatccaggctgcaaaattgaaaactggagggcgggtgctgcrtcctcaccagaktgttacacaccagggtcttcctgcaggtatccaaggaatgccaggcatcccagggctgtcaggaatccctgggctgcctgggaggcccggccacatcaaaggagtcaagggagacatcggagtccccggcatccccggtttgccaggattccctggggtggctggcccccctggaattacgggattcccaggattcataggaagccgggtgagtgggcgtcttttactccccttgttctgtgagctcctctcccctttgcttgtgaatggacatgctttrgtctggaatttgctagggtgagagtgtcagtggcaggttcagggcagcctcaggcttggtggggtccacacagccctggaaggagctgctgcacttggacaccatgcagatgtgatgtgagtccaaccggctgccgtggcccttctgtgggcttgtgctgggtgaagcatgttgtctgcatttttcatggtggccttgagagaacaaaacttgaattttcagggatcagagctctaaaattgagcacatcagtgacaccaggcctgagagcccatggccgaaycacagcgtagacctgggcccggcagcctggcttcccatccgggccaccgttcactcagcctttgttcagcrgatgtctgttgagcacttgacatgggccagacacgctgttgtgatggtaacaatggtgagccctgaccctgggcagggctctcttctccacaccttctccctcagctgcagaatgaasgtagtagctaccttgcagttttcttgagtgctgtatagacagtgtgtataacatagcacagcgtggctccccatagattccgtttcctagaattccatttctagcctcgttcatatgaagatagtgtattctcacagtccctagcacacggctggccttcccagggggatgggcacatttggagcagatcagaaggtctgggccccttgrtgtgtttcagtcgcgtccgtgtgaaaagaccaccaaacaggctttgtgtgagcaatcaagctgttaatttcacctgggtgcaggcaggctgagtctgaaaagagagtcagcgaagggagataggggtggggccgttttataggatttgggtaggtaaaggaaaaaggggggttgttctctgrcgggcaggagtgggggtcacaaggtgctcagtaggggagcttttgagccaggmtgagycaggagaaggaatttcacaagataatgtcatcagttaaggcaggaacaggccattttcacttcttttgtggtggaatgtcatcagttaaggcagaaaccggccatctggatgtgtacgtgcaggtcacaggggatatgattgcttagcttgggctcagagscctgacagtgtgaacccttagtagcaggccagggcctgcctgtgtgtstgtctggcccaccttggtgtacagaattcttcaggggtcttcctcccctcactcccaaaatctgcagctgagagkatcttctagccagtctgtgtgtgctattcaggtcactttaaaaaagaaagatgccagccaggtgcagtggctcttgcctataatcccagcactttgggaggccaaggcaggcagatcacttgtggtcaggagatcgagactagcctggccaacagggtgaaaccccgtctctaccaaaaatataaaaaattaaccgggtttggtgctgcgcactcataatcccagctactggggaggccgaggcggaagaatcgctggaacccaggaggcggaggttgcagtgagccgagattgcgccgttgcactccagcttgggtgacaaagcaagactccatctcaaaaaaaagacaagaaaaaagaaagatgcctgtttctgccaaagacacctacaacatccaaaggacctttattcataacagctcgaaactaggaaacagcccaaatgtccatcaacagggaaaagaataaatgaacgtggtatattctaaccagacacagcattatctgtgcattttatctccatacacagcaataaatgagaattcttggtaaaatccaacaacctaacttcatttccaaactttatgttgaacaaaataaaccagaaacagaaaagtacacgattcagtttcatygatgtgaagttcaagaactgacaaggctgttagatggggtatcgggagcacrgctgctttaggtggggttgtcatagagtgctgacagtgttctgtgtctttcagtgacacacgagttcagatgcattgagctgtgcgtttaagatgagtggacattactgtatttaagttttgcttcagaaaagtaagctttgagaaagaaaaatagagcattacctaaacaaaggtgcagcctgtggataccctcccccttcctcccacaaaggagcttttgttttgttttgttttgttttttgagacagagtctcactctgtcacccaggctggagtgcaatggcatgatcttagctcactgcaaccactgcctcctggttcaagcgattcccctgccacagcctcccaagtagctgggattacaggcgcacgccaccacgcccagctaattttgtatttttagtagagacagggtttcaccatgttggccaggctggtyttgaactcctgacctcaggcagtccacccacctcggcctcccaaagtgctgggattctaggcctgagccaccacccccggcctagctatattaatactgcagcgactcatgttaggccatgcttgtacattgatgctgtagtactaaagtcccagtggcacccaggtagaccagaactctcatgctccctctggggaggaagccactctggaggggaaaactagggcttccaggaagccaccgagcaactcaggcatcttctcaatttccttaccagccacctgtgtctttctggagaagtctccctctgtgcacagatggaggcgcacagccccatatctgtgttataatctgcagagagcaagctctgcagtctggctgcccaaactgaaatcccggttctgccacttgctggctgagtgaccttaagcaaaacctttctgtgcttcagttcctttgcctgtcattgggaagtaacggtgcctgcctggcagggttttcatgaggcgtgaatacgctcttgagacggggtccaccatgtgcacgcgggaaagcatggtggagcgaggatgtagtcagagtcaccgccgccgctgacatcaccacactgtcgtgatggagacctgggccactgatgctcttcattatgatgcagttgccaagcttgtttcattgtatcacttcacagttccataagaacagcaaggccaggtgcagtggctcacgcctgtaatcccagcactttgggaagcrgaggagagagaatcacttgaacccaggagttcaagaccagcctgggcaacagagcaagagcccatctctactaaaaatttaaaaactattagcagccaggcttagtggctcacacctgtaatcccagctgcacaggaggctgagacggaaggatgacttgagcccaggaaatcaaggcaacattgagctatgattgygcttctgcactccagccwgggtgacagactgcgatcctgtctcaaagaaataaataaataaataaacaaaaagaacagctaagcaaaccgcctatgatacacactaaaaaacacgagttttccacaaaatgacaagatcacaaaccttgagtattgtcgttagcatactggatagttaaataagtgagctaacttcagagttacaactgacttcgctaacagccttctaagatggttcatgyctgtctttagggtgacaaaggtgccccagggagagcmggcctgtatggcgagattggcgcgactggtgatttcggtgagtgttgcccgtccagtgaaaacagggagtccacaattcagagctctctgagcatgtgagccaatttcagacctgcaagtgctgttaggtattttaaaacaaattattctygttaggaatataacaaaatagaagttgcaaaactcacaamgtcccartggaaagtcctgttcttagccrtcttttttgcatgtaacaggtgacatcggggacactataaatttaccaggaagaccaggcctgaagggggagcggggcaccactggaataccaggtacgcaagttattttccttgtcttyrtcttcaacaacagccctgagcctttgtctaggagcccgacttgccaaacagatcaaattcagtaacawccagaaagcacttgatagtgaatgaggtcttcaagtccaatgtgcaagaaagaccgtcgtttttaattaagttaaayctgaagataaaatcaggaagtctttctctctctctgtctctctctttgatactgaaaaaagccagaatggaccctcggtggatgagaatcactgcagtccataaagtgtaactgatgaaaagccagctagcaccctgactcccggaacacctgagggcgtgcarcaggtggtcgctgacccgagcttctcagaaacagcgaagggtccaggaaagggggagtgggagtcaggccatcgcttgagagaratatggaggcagctgaccagcccgagcgagttgtgggggcctggggcggcacagtgcctcccttcccttctgcacatcactgaggttccactcctaaattcctgcctgcagtgacgtctcaaggggactgtgatagttttcttctttctggggattttcttttggggggaccccacactgctcaagttgctggagccccaggggcttgcagggctggccctggtgggagggaaggagtctgtccagggttggccagtggggagactgctgggccagttctttatctagaaattgctctggaatggaaagacgtgttcagttgagcacaggatcagagaaccgccrctgggaaataggcgcctctgtttaccagccctcccgggctcctttgttatctgtgacctgggctcccggtggcttcctcctgagtgacgggagctctgtactgctgagccatccggcrctgggctggctgtgtctgccaccctaggccattagtcyggccatttggtttataaacacagaaacgtggaccatcattaccacgcrtctctaatgatgccttcacttgttcaactgaaaatgtgtcagggaagagacgctacccccacccaagaattatttttgctgttacctttgaacattttggtttttgttaaactctgggcccagaaaggctttggagtgsagcctcccctgcatccatcaccagaagacggtatttcggagctgtggtcccacaatggaagggtggggccagctgtacccatcatccctgggggtgtcctgttttccctaagacagtgagkggtgcatgggtacatgggtgctgccttggaagctggctagtgcaggctcagagggaggaagtaggttaaaaatcagctaaggaaggagcacrgttggatgcctctctccattcctgaaggagcagcagtgtggttctgcacatcctagagccggggttccagggaacccacaggggcgcrgtgtctgtttgttccaagcagcatgtctgtggttgcaggtctgaagggattctttggagagaagggaacagaaggtgacatcggcttccctgggataacaggcgtgactggagtccaaggccctcctggacttaaaggamaaacaggtaaaatctcccrcagccacacagccttcctcaggcaggccctccrgagaccccagaacaaaggyggycaacattgtcaatttcctccaatcacacccaaccctggaagctcactcgtgcctgctgccagcttaggagctttcctcagtgctgatggcatggasagaaacaaccacctgggctggggggagacctgagaattggagagaagcatgggggtgaatgagaagtgcctcttcggttgagcctctgtctctcatatagaagccgacggtttgtaagggatccctttgsttgcrttgaatatgcagaaacccctatgaacatcctaggttagagaaggagagcggacagtgggctggcttcccacgctgttgctgctgctgctttctgtgtttactcagcaccsgggaaygccaagaggctcatctctccaggcactgcctcagggtcctctccagacgtctatttggataatagggcgacaattaaaactacacgctattttctctctggcaaggctgagcaaatcctattgaatttgtatgtggggtctaagaccacctgcatccccagcttgagggacagttctaatctctcctccaactggcactgcggcccttccggccctcgrcccctcccagagyggctgcccctcctgccaggacctcaccacacagcgcccaaggtgtcctgtgtgctcagacttaatgctgtgttcaccsccaggctttccagggctgactgggcctccagggtcgcagggagagctggggcggattggactgcctggtggcaaaggagatgatggctggccgggagctccgggcttaccaggtaaggtcacgtaaaacacgtggtcacccagacccagagtygtgggctgtgcaggaggcaccgctgagcaggccagcctctctcagggygacttctaaggcccatacgagagcaaaggcaggtctgctgtggcttacggtggtctgcrccaacatagcagcacagggtatactggcgccccaggcaactgggaatcaagccagatgcacaaatctgcccagggcttcacctcccagaaggatgaatgaaagcctcccagagaggcttcagggtccacttgtcatcgccacacagggacgcacagcaagatcagggtgcaggagcagcctcagtgtaccactgtgctgcacgggccacccccggggcctccttacagccccgagacgggccaccctgccatgctcactgcccatgtaacagaaggaattgccacctgtttgctgtgtcctgctttagaaatatttaccctcagaaatccagagggaatggaaatgacaccgggctatttgttccaagcagcttttacaaaccaaacatacagcagtggcsaggcgtcaagaagaggcatgggacatgtcactccccaggccccttctggcctagtgagtctgttaaaaagattctatgaagacagtgttccagttcaatggtgttcctaggtaacataagagtgcttagtttacatgtcgtgtaagttgagcgtgtggcttagctgcttcctatttgtggggctttagcaggattgtatgggtgacagtatcaggtgacagtttcagagccaacaamacacatctgagttatcttgagggtttctcccacccagaaccccctgtgctgtcccacacatgaaataacaatgagtgacacccccacaggtgaaataacgatgagtgacacccccatrggtgaaataacgatgagtgacacccccgcaggtgaaataaataacgatgagtgacacccccgcaggtgaaataaataacgatgagtgacacccccgcaggttttccgggactccgtgggatccgcggcttacacggcttgccaggcaccaagggctttccaggatccccaggtaytctgtgccgtcccagccccgagtcccacgcagaggtgtcgagsgtggggactctgtgctgagtctgccctccagacttcagggaatggagggtctcagagagcagggtgggcttcctgaagtgctatgcgatcggccgtgaggggcgggtccgggccctgtggtcctgtacgctgctaagatgtgatccctaagaatcggtttctcaagscagttgctgggttgaatggactcatcaggcttttagacggagagagaaatagagtccttgctttttcagcagcaccgytgggagggtgggatgcacctgcgcccctcaggtgtctggagtrttcactctgcccattgcctgtctgtgatctttcattttgttggcmtaaggaagccagcggtytccacctgcccctgggcagttctgatgctggagacagtgatagcgcttgggcacccacaggctgggagccaaaaacaaccaaaatgggtttcctcccagttctggaggctgggatcagcatgccagcgtggtcgggttctggggggggccgcgtcctggctgctcgctgtgtcctcacgagggagagcacccgctytcccctgtcacttcttataagggcagtaaccccatcttggggccccaccctcatgacctggcctaaccctaatcacctcccaaaggcccctgctccaaatgccatcacactggagttagggcttccacttaggaactttggggttggggagaatgacacaatcagtccatagcaaggtgaaccaagggcttcttaccacaggaaaaagaaactaacaactttcatagcactttctggcttattttataaactactgtagcacacatttttccctgaatggggatataaagmctcattatttccaaaagccaatggcagaataaggtttccatcctgagcccttccagggtataataacagcaactggatgatcctcaaaaggatcatcagactttcccacagaaggcctccctttaaccctgtcctccccaagaagctgagatagcatagtgcaggaaggcttggcagcttcttggaacttctttattttaaattcagctattttcatcctaaattttaatgtccttgtcttttcatttaattttgaaatctattataggactaataaaataacatttgaaggacatcaggcactaagtggggaatcattttattattatgtctttttttcaaaagataaccttgttttcttttcaatttatacaaattatttatgttcagtggagaaaaaaaaattaacacatttaaacacatttaactcgggaggctgaggcagaagaatggcgtgaacccgggaggcggagcttgcagtgagccgagatcgcgccactgcactccagcctgggcaacagagcgagactccgtcttaaaaaaaaaaaaaaattaacacatttaagaggaaaaaaagacccataatcctaaagctgcttttagaatgtgctgtttgtagacatttcatataaccaaatattgctctgtctacaggtgaatttgtatgtgtgtatattacacgtaaattcacgcactcctgcgtcattaacactccattacagttccagtgggcgagtggcgggaaatcctcgtcaagttgtcttgctgtttcctgccatgatggcgatgagcacctgataggagaagggggaagactttagatagtgtttactttgaaaacctaattaagcatagcctgaagagaagcccccaggagcctagaggcccgggaggggtcccagctccttgacccactgtttctgtgaatttgaaccctctgatgggcctcgatcctcttatccatagagccaagggcttccactgtgatctctgtaagatcccttccaaatctcagctcctgtgacctggaggccatatattgcaatgcaagctgaaatcaccatggctgcctctgtttctttgcttttgaggcaccccaagctgttctttcacttaggaaagtcaactgtatggttggaaacaccgacatcagctgctgttataactcttccacaggttctgacatccacggagacccaggcttcccaggccctcctggggaaagaggtgacccaggagaggccaacacccttccaggccctgtgggagtcccaggacagaaaggagaccaaggagctccaggtgaggccacacattccaagccaacattgccrtcccagtaaccagaacccacccagaggtggggccatggagtgtctatggggtgggagaggctgtgcagaagtgcaggaaagagctggtttttctggggaggactacctgttgcaggacctctcagctagtcttagtttgttaggcaatttattttatcccatcagtgttagtgaggcactgaccacccatcccgtggagtaactgataagctccctggcctagagaccccatcagatcctctgtgygcctggggcactggcacaggccttgccataacaagcactctgggtagtgaatgtgcgaataaatgcattaaacctcctagcagagccacgctgacccatacttgggtaggaaatrcccagaaacttgtcttcccaccccatagcctccctgctcaccagccaaggtgggctcaagtctaaatggcagtgagaaacattcctagatagaaaccaggaccttcctgggagccagtctgccaagggtgttgcggtctcattgtgcatgagcccacagccccagagtctgctcctgagatccatgggcccctcccccaccccgcccacctcaccagcctgaccaggggcatctcctggctcaggtacgggagctgggcagcacacctggatggacagcctgggcaccctgggctccatgctggcaacagaaactctggcttccatccacaaaggcctgagtttttctagtgccaattccccatgaagctagaaccagacatccacaggagaggaagtcaggaccaaggaggccagcaaccctggcttttgctggggtgcagggatgtctcsaggcttgcagatcacatctcactctccaggatctgctgcctgccctctcccctcaccagcagctggaaactccagaatcccctagcctcagagctccacagcactgatctgaagataggagaaagaggaggggctctgccaacaggagccagactatcctgggaggctgcatggtgctgccagagccctagtcagggtgaggatccaggacagtccaccagcacagcctcagccagcggtgaggatctarggtcagtccaccagcacagcctcagtcagagttgaggatctagggtcagtccaysagcacagcctcagycarggatgaggatctagggtcagtccaccagcacagcctcagtcagagktgaggatctagggtcagtccaccagcacagcctcagccagcggtgaggatctarggtcagtccaccagcacagcctcagtcaaggatgaggatctagggtcagtccatcagcacagcctcagccagggatgaggatctaaggtcagtccaccagcacagcctcagtcaggggtgaggatctagggtcagtccaccagcacagcctcagtcaggggtgaggatctagggtcagtccaccagcacagcctcagtcggggtgaagatctagggttagcataccagcacagcctcagttggggtgaggatctagggtcagtccaccagcacagcctcagtcaggggtgaggatctagggtcagcacaccagcacaagctccactgaggagtgagaatctaaggtcagtcccaccagcacagcctcagtcaggggtaaggatctaggacagtctaccagcataacctcagccagggatctagggtcagcgcaccagcagaagctccacccaggagtgaggatccaaggtgactccaccagcacaacgtcactcaggggtgaagatctaggtcaatccaccagcacagcctcactcaggggtgaggatctaggtcaatccaccagcacagcctcactcaggggtgaggatctaggtcagtacaccagcacagcttcagccaggattgagggtctagggtcagtccaccagcacaacctccactcaggactgaggatttaggtcaatccaccagcacaacctccactcaggactgaggatctaggtcagtccaccagcacaacctccactcaggactgaggatttaggtcaatccaccagcacaacctccactcaggactgaggatttaggtcagtccaccagcacaacctccactcagggctgaggatttaggtcaatccaccagcacaacctccactcagggctgaggatctaggtcagtccaccagcacaacctccactcaggactgaggatttaggtcaatccactagcacaacctccactcagggctgaggatctaggtcagtccaccagcacagcctcagtcaggggtgaggatctggrgtcagtccagcagcacagcctcagtcaggggtgaggatctggggtcagtccagcagcacagcctcagtcaggggtgaggatctggggtcagtccaccagcacagcytcagtcaggggtgaggatctggggtcagtccaccagcacagcctcagtcaggggtgaggatctggggtcagtccaccagcacagcctcagtcaggggtgaggatctrgggtcagtccaccagcacagcctcagtcaggggtgaggatctggggtcagtccaccagcataatcctcccaggagcccagcagtagagttgaccatgcccgtgacctttaaatcagacacctgttgggttcttgttctgcgtctcacgtgcaccatattttcaccatgtgaccttggccatggtattgaatgtctctggctttgtctgtcaaatgaaaataaaaatgcacttgtgagtattgggaggatacaatgagatactacaggtaaagctcttgcacacaggaggccagcaataaatgtttgctatctttaaaggccttgaaacatagcgttgttttcagagtgtcatgatgatcagtttaccagtctgtcacctgaaaggcatctgggaaygcagcaacggggaagacttggccaggagatgtggagaggagatcccgcacagggaggggcggaggaaactgagatgggatttcgacagggtgcacacagtggcccatagargggggtcacagaacacagctgctagcattttgtatgaccatgcattgttaacgtttgattcacacagcatgatgttcaggccctgtactygaccacaaaaaagatttaagatttccatccccaaggacagagatttatctcatttattttccacttaatacctcagcaaaatgcttgtccctgagtaagtgctcaacaaatacttgctggagaagaatattgtgaaattgtaggataattttctgacatcagtggagagttacgtgtagctcagaacacccctaaggtaacattgatggccttattacacatttgatctgtgtgggacccatttatcaaaactctccgtgacctcctgtggccctccttgcattccatcccagggacctggacggtgtccccggcttccaagccaccgtgcggcatgctgayttttgcaagccatgcccccaccctcgacctgcatgaacgtcacagtgggcccatgagctgatgacttcagagcaggtcctggaggccagggcagacactgcccmgtgccattgggccttggcatatgaggccactgcctctggctagtgatgagggaaagacgaccttccatgatgaygttcacacactgatcataatgtcaytcaggacacacactcttctctcaaaatatgggaataatttgaatccgtcatcttccttygcatgagttgcatctcatttgtattagttcgttctcatgctgctatgaagaaataccrgagactgggtaatttataaaggaaagaggtttaattgattcacagttctrcatggctggggaggcctcaggaaacttacaatcatggcggaaggggaagcaaacacatccttctycactggcggcaggagagagaagtgctgagtaaagggtsgggggaggccccttataaaactatcagatctcctgggaactcactatcacgagaacagcatgaggatagccacccccgtgattcaattacttcccaccaggtccctcctacgacatgtagggactttgggaactacaagtcaagatgagatttgggtggggacacagccaaaccgtatcacagctcactgaagctagartctgcaacctcacctatttctgcagctgacattcragcatcagttcctgatttggccttgagtcatgcaacatgggccttcacggaacccctkttagtgagactcttttatgtcagtacttaggacgatccatgggggctactragaaatcatagcggtttccgtctagattccagcaaactgactcatgtttgctragtgttctcattaacagtcctcatcactgcagttaagttaattatgttttcgtgggaatctgccagtctkcggattgcactggatcatctaactcaggagtctgccattatttactgacactcaccatctgtttcgggtactttgtgacaatagctagaagcagttcaattggtgtcattttatatcaaactacagatggtggctcactcatgccctcagggctaatgaacccacttgcatgttgtctgtgatttgtgagacaagcctcacctctctaaatatttatcctgctgtttgttttgtcctacttggaagcacgcatgaatggaatcctttcccctgggatggataatggmtaccaggatcttccaaagggaaaatctcttcctgctgctgatgcgtgtagattagtcataaagccagaggggaaacagaaaaccactgttgctrccttttctcatttttatagatttgcacygtttcgcccagctcactatttcctgcagagcagaaatgatgccttccttgcccacttggacattctgacattttgcagggttctaatactaatcttggtccccagcccgaggtaaaacaaaaggctgaaggtgcttaggagagaaagtagacttaatccgcccactcaagtccacactgatttctacccaccactgccctacagcacataaagctccattagtgtcttgttggctgacagcacagggaggagtggaatttccacagatttccttatgtggccatttccctcttactctcctactagtgccaaagagctccagcctttgacccaaaaactgttggttctcattattcgcagtagttatgttctgaagtcaccaagaacactgacttagtgaatactgaaccattgctcctaggggaaatacaaggctaagttcctgcaagcctctgctcacaagatgtttgtcaatgatcagtatataagctggttttctgtgtaacggcaccttgtttagtgtggattgctgattcaggaacagtcaacatgcactcactcgtgcctgaatgcagcttctcttacatatgtgtttctccataagggacttcacagccttcttgcacttaccaacagtaggatgcacttcaacacaatacatggggggcatttgaaacagcaaaatcaccagcataaagcacaaaaatgtggaaaacagggcactacagagaccaagacaaggacacgtgtgtacagtatgagctgcagcaagaaggcaggagcgtcaccttgctggatctcagctgggactcattttgcctctgtgtatatctgtgaatgccagtgttgatttgggggggattccaagtgagttttagtgagtggacaaattgggaaacacagaatctgtgaataatgaagaccaactctatccaagctgggatccgaggcactggaggacagccgcagggagggttgacaatagtgatgtcaattgtaagcctcatttgcaatttttcaaccttctgtccatcacctgtgctgaccactgtccacasatatcaggatcagagtctgaccagctgtgcctcgcctggtgctgaggctccatctaagcatgatcgggcagcgccttggggaagtcgagcacaggcagacaggatcccagtggagggctcctcacaggagaaaggctggggtgggggaggggttcacatagcccctgccccsccaaccccgccctgagggcctccccagccccaccatgagatgttccttggcctgagggcacctcccatcactgtctcgctcgctaggctctggtccaccacagrtgatggtgtggagggaaaatagtagatttgaaaagttgggtgctaacgctgaaaataatttcttctgttttcatcctaaggggaacgaggcccacctgggagcccaggacttcaggggttcccwggyatcacacccccttccaacatctctggggcacctggtgacaaaggggcgccagggatatttggcctgaaaggtaagcaggacttatacatctgtgcttyracatctctaggggcaggagctggcaatggcccgcttaatgtagggggagaacagacgttcatttccacgctgtgcccagactccggtcaaagaggcaggagccatgatggctcctcctgtgtcatttccatcacctgcacgacctggtccctgggaagctgagacacaggccatgtcatttacttgctgtaatagcagatattcaaactgcaggggrctcagaaatgtgcagtatgaacggctttcttcttcctcactgtattgtgtttagacaagtattaaatttaatttgcacttcctaatcacgaacgagctgaatattggaaagagatggcgtaaagatgaagtcacccgtcaaacaagtrtttgtgcgtcaaggttcacagcagcactactcacaagcaccgagtgctgaaagcaacccgagtgtccatcaacagaggaattaagaagcaaaatgcagtcagtatmcacccagtacaagaggagtccgtcttttttgtttggttgttttcttgttttttgttttttgagacagccttgctctgttgcccaggctggagtgcagtggcacgatcttagctcgctgcaatctccgcctcccgggttcaaggaatttttgtgcctcagcctcctgagtagctgggattacaggtgtccaccaccaagcccagatgatttttgtatttttagtagagacagggtttcaccgtgttggccaggctggtctcaaactcttgacctcaagcaatcctcccacctcggcttcccaaagtgctgagacgacaggtgtaagccacctttcccagcctttattcggtcttaaaaagaaggarctcttatcacctgctaccacctagatgacccttgagggcattctgctgagtgaaagaagccagtcacaaaaggtcggattctgtgattccacacatacgaggcccctgaagtcatcaaattcatagaaacagaaagtacaatggctgttgctgagggttggggggagagggacacggggagtgcgtgtataacggggacagatttcagtttaggatgagaaagttctggagctkgtcggcggtgaaggtgaatatattgaatgccactgagcagygcacctaaaaatgattaaaatggtaacttttatgttctacgtattttacgacaattttttaaaaacatagacaaagtcattccatgccacaracttgccagagactgtcgcctgaatgggtgacggtgcacctgactgcccccaggggccttggggycctgtttaaaccctcctttcttgtccctaatgccaacaggttatcggggcccaccagggccaccaggttctgctgctcttcctggaagcaaaggtgacacagggaacccaggagctccaggaaccccagggaccaaaggatgggccggggactccgggccccagggcaggcctggtgtgtttggtctcccaggagaaaaaggtaacagtgcccatggccatgggccagcagccctggccacagtgagaggagccccctccccacagactttcgtgtccctaaygtcttgtttgtgttgcagggcccaggggtgaacaaggcttcatggggaacactggacccacyggggcrgtgggcgacagaggccccaagggacccaagggagacccaggattccctggtaagtgaccgtctggtatcttcagagctagtggctcagcccagcctctccaggcttggggacatcctggaggtcaaacggccaggatcctctctggcatgggtcacatgttgtaaagagcagggaggaaaccaaggctgtgcctcggatgttgtcacaggaccttggggaatggagagcttmatattcaaayggcaggcrctgagtcacggctcaggsccgttagtgtctggctcatctctagaaagcacagttgtctgggaagctccaaaagaagcctccctggtgagaaacgcagtagcactcggagcaagagagtggaacraccttgtgtgtttactggggcctctctgtttcccttccaggtgccccygggactgtgggagcccccgggattgcaggaatcccccagaagattgccgtccaaccagggacagtgggtccccaggggaggcgaggcccccctggggcaccgggggagatggggccccagggcccccccggagaaccaggtagagtgctgagctggggcctggagcccctcggggctgcccgggcaaggccagggcctgctggcattgcrtcctcttgtgttctctttgtggatygccggccgtgccaggcgtggtcagtttccagccataacgcttctttggtggcttgcaggtttycgtggggctccagggaaagctgggccccaaggaagaggtggtgtgtctgctgttcccggcttccggggagatgaaggacccataggccaccaggggccgattggccaagmaggtgagtgacagtggggaaggaccttcccaggtcctagtgctctggatctgactcacagactgtggtctgcaggaaggggacacacgagagcccagaaaagccagaaatgaggcgctgccccaccctcctgctcctaatctgggcgtagcagctacactcctrtgcccagcagaacacctggccccgagtcctgggacagcctccctccttttcctgggacacctgcggtgctgtggagtgggcggcagggatcagtagacttcaagggtcaggattagacaaggagccaaaagaaaccgactattaaaatgtacaagagccrcactgcgaagccctgtcttacttttttttcttttttggacagagtctcgctctgtctcacccaggctggagtgcagtggcgcaatctcagctcactgcagcttctgcctcccgggttcaagcgattctcctgtcttagcctcccaagtagttgggactacaggcatgtgcccccatacccagctaacttttttgtatttgtagtagagacggggtttcaccatgttggccaggctggtctcgaactcctgacctcgagcgatccgccagccttggcctcccaaagtgctgggattacaggtgtaagtcaccgtgcctggtcgtcttattttttaaaattatttgcacatatacagaatgaaataggccaggaataacagctattcatgaaaaaaaaaaacctcaaaatttgtcttaatcaacctgagctcagtttgagccaatggtctgagcattaaaattaaaattaaaattaaacataggggccgggcgcggtggctcacgcctgtaatcccagcactttgggaggctgaggtgggcggatcacaagggcaggagatcgagaccatcctggctaacacggtgaaaccccgtctctactaaaaatacaaaaaattagccgggcgtggtggcgggcgccagtagtcccagctactcgggaggctgaggcaggagaatggcctcaacccaggaggtggaggttgcaatgagccaagatcgcgccactgcactccagcctgggggacagagcgagacttcgtctcaaaaaaaaaaaagaaaattaaacatgggtagtactattggtgtccaagtcaaaggaaatagcagtcccctgcccctggggacagatccgcagccggcaaattatgggtagtgtggggtgcacctgaaaacaaatgccagcaaatgggagcccgcccagggtaggagacaagctagggatggtggaggggaagtgtcctgggagaaagggccatgaccatgggtgtcccttggaaggggaggggacaatgggagaaagggtcactggggatagctgagaaatattcacagagctgctgtgctggaggcagatgagccacccccgtgtgctcctcgggtaggagttacaggaggctgcacgcagaaagaacattctaacccaggctgtggtcaagtgcgcagtcagcatggcctgcgatgagccatgtctcctggaagtgtccagcggagggaggccactgctgggggtgggggctggcctgcgatactcctccggacacttccaacgccaggcacgttgggcacatcctgaggggcacatgcctacctatggctgactgagtcttttatggaaaggacccctcctctgtgcccagtgccctcactgccatcatttcatgctactgagaacaaagtgtggatcaaatccttcccaagagtctcctgatctcaacagactgagccccaagatctggggaaggagagcgatggttctaggcgcacctggaaactgccctgcactcctgggtcccgaggtttctgtggggcggctgtcaagggggctgctctctctctctttctcaggctgcaggtgcactaggccgtccactctctctctctctcaggctgcaggtgcaccaggccgtccactcactctctctctcgggctgcaggtacaccaggccgtccactctctctctctctctctctcgggctgcaggtgcaccaggccgtccactctctctctctctctcaggctgtaggtgcaccaggccgtccactctctctctttctcgggctgcaggtgcaccaggccgtccactctctctctttctcgggctgcaggtgcaccaggccgtccagggagcccgggcctgccgggtatgccaggccgcagcgtcagcatcggctacctcctggtgaagcacagccagacggaccaggagcccatgtgcccngtgggcatgaacaaactctggagtggatacagcctgctgtacttcgagggccaggagaaggcgcacaaccaggacctgggtaggtacctcccacccggcccccgttgcctgctcagggctggcccggaagtggccaagatcaaagggccacagcgagactcccaaaccctccayggctgrtaagttcccctgacggaagggtccatctacattcctcgagtgcagaaagattaaaacggcctttgaagcagaagccttacaaagcccttaaacctcaggaccttaacacagggacctgccttttaacctggtattgacttccgcaggctcccatgtgacccgtctgacccccgacccctctccagtggagaccaccaattacttcacctccttcttgtttttgacccaagttctgtagacttggagtcaggcaggggccatgaggggctggggttcatgtaagactctcccatacagccccccgaggaaaatggacccatggacacgtgtgcatgctcttatttaaggaagcctttgaaaggcattaacgcgacttcgaatacagaaaatgcaatacacacaaattacaagtggaggtagcttagtctgaggtcctctttgagggggtgacgggaagggtctctgggatactggctgtgttctgcctcctcggtgcaggttacatcaggcgttctgcccccgggaagcatgttgctggctcatggtgccttcacattcctgcctgtgcgccccrcctccacaatgagtttctaaagaacaacggggcaaaggccgccaaggataagggccaaaaatagatctaggaacagggccaaggaggcagcctagcaccgggcatgtttgctaaaggtggctgcacttctgggtctgagcttttcagcaatccatgtgaagagggaaacctgcttagctgcagcattcgttgtggccaggagataaaggctatcttagtctccagaagcaataaagctacatggaagggagaagggccaggactccttctggggtggctccttggggtcaaagagcgaccccttggaggccatcagagttttcttggggccagtgctgttaagaccccactaaggtaaggctcacccaaaatgctattccatgaagacgccactccctggtgatccaacttggcccagtatgtgtgagaacttgtagaagaacagagctgttccaaaatgccagtggagtctgatcaaaaagagaaaaagaaagaaattgggaagccttagcctggccctccagtaggtggctaaactccaccaggtgccctggggcgagtccgtgacacacagcctcctgggcctggctggggctggcaggtgcgtcttctagccacactgcactgtgatctcatgacccctccttccacagggctggcgggctcctgcctggcrcggttcagcaccatgcccttcctgtactgcaaccctggtgatgtctgctactatgccagccggaacgacaagtcctactggctctctaccactgcgccgctgcccatgatgcccgtggccgaggacgagatcaagccctacatcagccgctgttctgtgtgtgaggccccggccatcgccatcgcggtccacagtcaggatgtctccatcccacactgcccagctgggtggcggagtttgtggatcggatattccttcctcatggtatgtggtatttgcccagttcccctccccaaccacaccctgctggggacacagcaagaacagctgcctttgtgagaagaatcagacacggcagtccagggtgtgcactgcacaagggtagttggcccaggaagcgagcgagagctggaacacagcttacacttggctaactgagccacatgctgggcacagggcttcctccacccagaaagggctcattaatttgccaccaggcctttgtaaggagtgtaaccaggacgaacttgcctgttatccgtcttactaggtacaacaccaacaccaaaggtgcagctgctttgggtttaccagaagtctaaatatatgggagacttttctctagaatcctgatcttatttagaatctatctggaacctagaataccctgaagaaatacctattaactggctggcttaaaatggatatatattcgtgaggaaaattctggaatacctttgggtataaaatagagagcctgtggatactttgaaagccaggagaaggtgcacaaccaggacctgggaaggcaccgcccacccttccggatcgcctttgggtataaaatagagaaccctcagctttggccagattaggtttagcttaacctccaggggagagaccacagcaccatagtgtctcttgcaatattgcctattaaagcagaggctcctcaacttggaatagggtcccgtcccgataaattcattgtaagatgaagatactataagttgaaagtgcgttttcaatttatgatgggtttatctggatgtaaccccaccaaaaatcaaatagtgaattgaatacatattgcttttgcaccatcgaaaactcaaaaatcctaagtctaaccatggtaaatcagggaccatctgtatactattgtagggagaaaagaaagtctcactgaggacagtgggtcttccagtgagtttatttatatgcattataactgtcataactccagctatatggattggatgcccagcatgttaaatatttcataaattatatatatatatatatatatatatatatatatatatacacacacacacacacacacacacaacataaaatataaattacatagtgattgctaatctttcaaaacaacaggaaaaaaaatccggattctaggaaaggaaggaaaagataaacaagtattggcattttaataggtatcgttgctatgataagttggagcaacaggatgctaaatcctgggcagggacaggcacaatttctacctttccagaagcttatcatggaaggtgactttggagcaaccttcttttgtttcacagtgaccttcagggtgcccctgtgtcaggaagtaagctttggttgctcctgtttttttcactcccgttgttaaattcaaaataaatgagcctctcccttgtgaagggcatgattacacagtatccagaaaggtcaggcatcccctgttccattagcatcaggtttcaaatgactgtcacgagataagcagacattatcctctgcacaygtaactctctgcttacataaatggctgacagccccagcaagcctggaacttgacatccccaaaaggcatgggttgagacggctcctgggtcaggacagatgggccagaagtaccttgacttctgagaacagaaagtccccattgtccctgacaatggataagtgagcagacacatctgtgtactggagatgtgccccctccagatgtgccctgactgccgtctaggaggcaggacctaaaccaagacagctgtgtgcctcrtctgcactttaaatactctttgatcccttctgtgtggtgacaagcatatggtaccactagggctgctggcatctcagcataataagagctgactttggagaggagaggacagcttggctgagagcaactgccccaccgtccccagtgggtacgcagaaggcgagagcagtgctgaggctagcgcctggctcacccttcttttgtccgtgaggatgggtggccccagaggatgcattttctgcattccctacaagcgagcgccacgtgggagggaggacaagggcagagccccggatgcagactgcagcagcaaaagtcattttcctcccctcccctcggtggcctctctcaaagctgctctggcagaggctacaagtatctagccagccgttattttagttcctcttttttcaattctggctactatctggagccctcacagccccttctccaggtcagcctctcgtccaggcaattctcttaagatacatgagctgctatgagtaccaaagccagaggtttgtccactgagagaagcacmttggaaagggtgcgtgtgcctggactgtgtgcacttatgcacgtgtgtgcataggggtgtgtacacaagcatgcactgtgtgtgtgtgtgtgtacatgcgtgcatttgtgtgtgtgcatgagtgtacaccatgtgtgtgcatgtgtgcatgtatgcatgtgtgtgtgcgcagcaaactcagctcttacctggctggtgccagcctctaagacttctcacattgtgctcccttctgacctcgttctgggagtcccaggtgtctcctttgggcagctcccagcatggcctcagctccttcagaccaaagtgaagccggaggtgccctggaggacgtctccacttcttattacctgctcattagcagacaagagcaggcagctcagggctggacaggcttctgccttatgtgagcagaacactttttaaaggtttttgggtttttttttgtatttaaaggaaagcttaaactggggcccctgcccaaatatatcatagaacagccccttttttccctgcaaactgaactgagatatttctattctaagtaaacagattccaaagcccacttaccactcaaagcctgctcagccaagccaaatggcccttatacaccaactctgggatccaggaggcctgccgtgcgcttccataaaggctaaacatgttgatgcaacagaaagtagaactttaaaatgaaaaaaaaaaaaaggcttccttgaagacctcagccatctcccagccagcctcagaatcaactatttaacaacctctgattgaaaaaatatatatttaattacacaagtaatacatatttattgtgaaaaatcagcaagtacagatttaaaaaaaaaaataaaaccactcatctttcctccctgatcatcagcattttcagagaaggagctgggaggcctggctgggtgattatttttaacttattagcctcagatgccagcctacatcttaattttatttttttcttctaaaaagagtaaacattgtgttatctcttctgccaggtatttttctttgaatggatgattaggcagatgttttgttttgttactgaaatgcagtggattatatctaccgctcgtatctgctgtcacggctctagttcttaccgaacggccagcctggctgtgaattagtgtccatgcagctgcctctgcagcacgtcctggtgcctggggctgcctcctgcagggggcccaygtgtatttcaccagccccctcttgctgaaggcgcattcgcgaggatgcctcatgtccgtattgacactcatggtttgctgttcagtaaaaacaaaygcacagaagagggctatgccctgaccccgtgccacctgcaggctgtgattcctaaccctgtcctgcccccctctctgtgcagcacacggcggcgggagacgaaggcggtggccaatcactggtgtcaccrggcagctgtctagaggacttccgcgccacaccattcatcgaatgcaatggaggccgcrgcacctgccactactacgccaacaagtacagcttctggctgaccaccattcccgagcagagcttccagggctcgccctccgccgacacgctcaaggccggcctcatccgcacacacatcagccgctgccaggtgtgcatgaagaacctgtgagccggcgcgtgccaggaagggccattttggtgcttattcttaacttattacctcaggtgccaacccaaaaattggytttatttttttcttaaaaaaaaaagtctaccaaaggaatttgcatccagcagcagcacttagacctgccagccactgtcaccgagcgggtgcaagcactcggggtccctggagggcaagccctgcccacagaaagccaggagcagccctggcccccatcagccctgctagacgcaccgcctgaaggcacagctaaccacttcgcacacacccatgtaaccactgcactttccaatgccacagacaactcacattgttcaactcccttctcggggtgggacagacgagacaacagcacacaggcagccagccgtggccagaggctcgaggggctcagggsctcaggcacccgtccccacacgagggccccgtgggtgggcctggccctgctttytacgccaatgttatgccagctccatgttctcccaaataccgttgatgtgaattattttaaaggcaaaacygtgctctttattttaraaaacactgataatcacactgcggtaggtcattcttttgccacatccctatagaccactgggtttggcaaaactcaggcagaagtggagaccyttytagacatcaytgtcagccttgctacttgaaggtacaccccatagggtcggaggtgctgtccccactgccccacsttgtccctgagatttaacccctccactgctgggggtgagctrtactyttctgactgccccctcctgtgtaacgactacaaaataaaacttggttctgaatatttttaaaccccgagttgttgaccgccttaatctcgtgtccatagagcaaaacgtctgctcagatggatgcgaggcacagcgtccgcccacgctgctgtttttaatccatctcagtagagttgaacccattcgtggtattacagccatttctcggggaatgtgtttgtttataactcactaatgcttacagaaaacaccccaaccaggccatgcgtgctggctcacgcctgtaatcccaacactttgggaggccgaggcagctggatcacctgaggtcaggagttcgagaccagcctggccaacatggtgaaaccccgtctctactaaaaacataaaaattttccggtgattgtaatctcagctactcgggaggctgaggcaggagaatcacttgaacccgggaggcagaggttgcggtgagctgagatcgtgccactgcactccagcctgggcaacaaaagtgaaactccatctaaaaaaaaaaaaaaaaaaaagaaaagaaaacacctgaaccagcacttgtgggaatttggagaaagggtacttcacaaatgtaagtcattcaatttgttccaacataggctgggtgcagtgtctcacatctgtaatcccaacactttgggaggctgaggtgggaggatcacttgagcctaggagtttgagaccagcctggacgatatagtgagatccatgtctacaaaaaaaaaaagatcccacataacttcccaagtcaaagctcagtatttcaaagaaacaatctccgagattcaactcacagtttattttgaccctctgaaatgcaatctcaaattgaagttttcctaagaaaaaggttcacattatgaaataagtatcctaccttataatgttatttgaaatagatacgcagccgccctggcgcgtgttcccccagaagctggctgaggccacgacctctacacagcacggctatatgggaaggcgatatcaggaagcctgagtgggacctggagggggtgataccaggaagaagaaaagccaactcaaggacatgggactaagggggttaccactgtgggctgtttaggcttgatcctgctggggatccaccaaggaaggatcctcagacggtccagccatggcttggaaagggaagtgttctccatcagctgckgtctcgactggtcaggggttgcctgagggtgctaattccctcacactcccaggtgcaccacacaccagcatggctgagtgggctcctgccagatgccaggtggaggtggtagagaaccaggcagagctgagacacggtgtgtcaggccacacctgctcatggccagtcaccacagcaatagctgtagcaaaacagtgggcccagagcgtgtgagacggggatcaagagaccagagctcgcaaccacagcaactctagaagctgggaagcaacaattcattctagactccacccctactgccaaggaggcaaccgcaaagtgtgctgcagtcctgaagacccctgctcgacttgaggtaggcttgataccttgtgtgtggatcacacctcagcgtcagtgcccagtgttaaacataaaagaaatgtttcaccctagacctaaaataaatgagaagacaaagatcctcaacaaataattggtttccaaaatgtggatcataaaatataaaccaatcacaattcataaccctgacatctgtgccagggagcccacgatcccgctgaagtatagtgagtggagatgcctcatctggaatcgaaccgctgaacatcctgcaccttgaaaatcagagctctgtccttcatggatcctgcatgttgcaaaagacagattttttccaggctagtttcttggtgccaggaataactgctccctgagagctgagtgtgcttgaaccaccctctaatgatgtgccacattttccagagggtgggtgccccaaagtcagaatcacttccatctcccagctgcttcagacagtgactttcagcacccctggcagagacgctgctggaatgcgcatgaagatgcgtctgcagccatcctgactgggtaggrgcgcccaggaagactcacaagccctggagagcacatcagcctttaaaccacccaagaagagcacgttggcaaggacggcctggatgggttgcttcagtgggctgggcctccggtaaaatgaatgaaagtacctgtgcatcagagtgacatcaggagaatgaaatcagtcactacacgtgaacgtgcccaaagccgcaggtatgtatgcactcgtacgtgtccaggacctaagaggaaggaggtagagaatcgctgcaacctgggagttctaaatgtgttgaggttgaggactgtgatttaaaatgcacagtgcagggaagggaggagaatgatttggaaagtaaattccatgacatgctagacaaggaagggaagggtaacactgagctgatcttaaagtgacagaccaaacccaagcagatgtcttgaaggcaacgagggaacagcatcctcacctcccacacgtggtacagcaagagcctcactctgcagactcaggaaggcaccaagctacaaacatctatgagctatttgtattcatacagcataagttcagctcagccaataaaatgtaaggctgtccttccccctgagaaatactcagtgcttctggttacacctggaggtggcttttccttgaggctgccttcctggaaaagggccatccacttatttaaaaagaaaaaaccacagaagtttcaggagctcattgaagccggtaggggaaacgtgctattaataatataagtaatttggaaatgagtggcgtctctaagaacaaaggcaaagagaactgcacacagcattgtactctagtggataaagttgtttcttgcaggagtaccagtgaacagtgctgacactatattcatgctaaaactgaaccattggttgggcgcggtggctcacgcctgtaatcccacaacagagcgagactctgtctcaaaaaaaaaaaaaaaaaaaaaaaagaaccattaattaagcggatggtcgatggtgggagccatgtttctcattgttgaaggagaatttacagcaaagtggggaaatgacacaatggttagagtccgagatatcagtaggaactcgggtttaacctattatagacacctatagtcacataaagaaatatctgtaggggttagtacagacacatgtatttcttcactctgtcagctgagagggcctcagagaagcagccctgcaggagcagtgagcacacctggccccagatctgggattctaacacttctccaataaaaggacccgaggctcctcggggagatggctgattccgagacgggggcaggaaatatagaccatgagactggaacatcttgtagtgccagaaagtaaggaagtgctcaaataaaaccccaaatggagacatgtggaagggacacgggagccatctgaaagagctcccaagatgaagccatctgaataagaaagtgagacagtactggataacaacccaaagaataaatatccatgagtccattctgagtcctcagccttcctctctaaggataaactgctgttcccagcactcagcgaggttctcaaggctgaaccgtgtccgagggagagtgacttatgggtggcacatctcctgcacggcctgtgcccagctgtgtggggcggctacagctccgatgttgatgcacgtgtgtgtgcagctgtgcagtggcacgtgtggcacacgtacaccctccccagaaaagaagcacctttcctgctcctacacctccccgtcaggcacctctcacaattctgccaaaaccaagggagatgaaaaacgaaatgtcacaaaggcaatgtgccttttttttttttttttttttttttgagacggagtctggctctgttgcccaggctggaggctggagtgcaatggcaggatctcggctcgctgcagcctccacttcctgggttcaagcaattctcctgcctcagcctcccgagtagctgggagaggtgtgcaccagcacacccggctaaatttttttgtattttttaacaaagatggggtttcatcgtgctggccaggctggtcttgaactcctgacctcaagtgatcccctcccaaagtgctaggattacaggcatgagccaccccgcctggccccaaggcaatgtgctttaaagtgaagctggctgtctctctggcattacagaaaaagggaaaatcattgctttctggccatttttctgtagtggctgcttcatggtgacattactctgctggggttggaggtggaagaggatggtcatcttcctcctgtggtccagcctctgcaaagtgctctcccaggtgcttttcctgcctcccactactctgtgaagtaggtacaatatactccatttcataaagagattttccccaaagatggcaaatcaacttgcccaagataacacaacccacgtgctcagggggcattcaagccaaacctctacactcccttcaggaaccgagctgacttcctaaaaacagtgaccactgagcatcaaccatgtgccaggcacccgaggcacttcatataacattacctgccatgtccagaagcctcaaagggtggggtcatttccacatactcgagagtccctgcacctgaggggtatttcacaatttcattgtacaagcccattttaattaactaggttcttctcagaggccaggaacacttagagatgagaggctgcagctgcaaagccacatgggatggggcaggaggggactgctgtcttcccgagtttaaaatacacccaggagccctcttcccccaccccacctgcagattcacacttgagaggaccttgccacatgcaagggtgactcagggaccttctcctcgcatttatggccaaagtacaagaacaaagggcagatggggtggaggccacttagaagatgtgggtcctgtgacggcataaaccagccctaaagctggagccattcctgcagaggccatttcatcccacatgggacaggaccccgcttctcctctgggtgggacccattcttttgccttgagctggcttattcttaactgtacactcacaaacataatccattttatctgcaggattcctgggaaaggaattcttgcattcagattatgaggactctgtccagggggctctcacacctccctcaaagcagagagagctcgcccctggccatgggagccgcccgccacacaggggctggtgaatgaggtcgccacgcagtgaggctgagggagggggtttggaagtgctactggggatgacagtggccagtcccaggcctgccaccttcagaccaagagcaggcacgagccaaccctggttacttaactgagaccagctcccaagagacagcattccaggcccccatgccttctcccggtgggaaaatctggatggaggataaaaaaaggggctgaggcttgtcctggatccgtgggtatccaccatttgcagcccgaacaaccaagcccacctttaggggaggaaacacatggcagcaactggaacgtggcattgaaagtccgaggctcagattcccaagccgccatgccccaggcaggaccttccacaatgacatcccaagaaaacagccaacgtagactgagctgggagggcctggtgaggaagtgggtggggctgggagccaaggcctgggcgtgtctcactccggccactgacaccctgacccaggaggcaccttctcgggccttgggtccacatatcctccagcaaggtgccctccagatccgatacctgagggctgggccagtggcttcaaggcaaacacaaagtgaaggggagggacacagagcttcataaccacgcaaggacgcttgctctgaaggcgtcagctctccctgaaggaggcagcctggaccacaagggaggactgggcccaagagcttccagagcaggcacagaggaggctgagtgcaggcggcac

SEQ ID NO: 8792 - DNA, 98716 bp, Homo sapiens
aggaagctggtaggcaggcgctagaccctaaagaaggactgctgagccagttcttaagcctgtggtcctgtcggtgaggaaagtgagagcagtccagagcaggtgaaaagagcagagctcattcctccagtggctcttttgcctaaagcagcattcctcaaacttctcactcgaagcattaagttacggtgagatgctaacacacgctttagacttaagtcaaaatttactgtgaagccacagcaaaccatggcttcacagatgaattagttgctacacaaataagttcgatacataagtacagtaattgcttttaaaccttataataagcagtaaattagaagttaaaccatgtttttcttttacgaactgaaagaagagaatgcttttgatactgagaatcgcacactgtgtccaggaagattgttcttgcataaccagacccacaataaatatctacaacttttcttacatgtttataaaataaatcttagaagaaaaatattgtagcttttttttttttttttttttcaatgaagctctatgaacatttcacagaactttgttcctgggagtagttagggaaatgctgcttcaaaaagccaattttaagtagttgtgaggcatccgagtggaatttggctgcactatccataaaactagagagtataggcggtatttcacctaccaaggtcagtaccctgcctcaggattcttactgttcatttgagcaattccggggccctctctggatgaccaggttcgtaaatagttgagactttgtgttatctcaaattgtcaccatcacctctgggccaatataggttagtgaggtcgagaggcccacaccattgacagaagagaattctcaggccgggcttggtggctcacgcctgtaatcccagcactttgggaggccgaggcgggtggatcacctgaggtcaggagttcaagagcagcctggccaacatgttggaaccccgtctctactagaaatacaaaaattagctgggcgtggtggtgggtacctgtagtcccagctacttgggaggctgagacaggagaattacttgaacccgggaggcagaggttgcagtgaggtgagatcgcgccactgcgctccagcctgggcgacagagcgagactccgtctcaaaaaaaaaagaaaggattctcaccttcctgtcccttcctaggagttttgtggtagtgttcgatcctgtgatgtggccatcttctcctcagggcctgtgagaggcaggcagcatctttagctgaggtagaatgcctgttggggaaagtcaaataggatggtggctggggccggggctctggggactccttctgccccacatactcaattggaaagactgagcaagtcccctcacctccctgggcctcagcttccctgtctgtcaaatggagggctcaactggggtgagctccagtttccttctagtgctaacgcgtgttcaaggatccttgctctcctttccggggagcatcaggggtgtgggctagatagcaggaaagaagtaggggtttgtaaacaagagatccaagcccctggacccttggtcccagcacccagtgcagccctcgccctcccagccccttccttagaaaggacaagaaaatccactccttgttctctccctgtcccatcacccccgcagtcccccacagatctgaggccggaggatgccaacatggtgagcaccctcttgctgtcttattcacgtaggcttttcttggtgcctgcacatggctcttgtaaggccaccaatcttgctggattatgacctcatctaaccttaattacttcctaaaagccatatgtccaagaagagccacattgggggttagggcttcaacatatgaatttggaggacatttacagttcagtccacagcacctggtcatgtggagatcccagtctgcatttgtgggatgaaatctctgcttttttaaagtttacacaccacctagctgggcacgtggctcacacctgtagtctcagcactttgggaggccgaggcggggatcacctgatgtcaggagttcgagaccagcctggccaacatggtgaaaccccgtctctactaaaaatacaaaaattagccgggtgtggtggcgggcacctgtagtcccagctactcgggaggctgaggcaggagaatcgcttgaacccaggaggcagaggttgcagtaagctgagattgtgccactgcactccagtctggatgaaagagcaagactccatctcaaaaacaaaaataaaaaaagtctacacaccaaaagagctgaaggcaggagagtttgtggtggttcagagtcctgattctggaggaaacaggcctgtttggagtcccagctctgctccttactagctatgtggcctctcagaggcagcatccttatctgagaaatcgggttgaccttgtaggtggctgagaggctcagatgagggctcgcatgtgaggccttggcactgagcagggcactcctactgagtgttcaaaggtcgtgagtaccactgctctgcagccctgggctctggtctcagcaatgccgtcactctttctggcttcctaagagtcagaaggcaagtgggagaatagaaccatttcctgtgtctgaaggctgtgcctcagtgcttttgactcactctgaagacagcaggcagccctttctgttttttttggagatgaagtcttgctcttgtcgcccaggctggagtgcaatggcgcagtctcggctcactgcaccctccgcctcccaggttcaagcarttctcccaccatagcctcccgaagctgggactacaggcacacgctgccacgcctggctaattttttgtgtttttagtaaagacagggtttcaccatgttgcccaggctggtctcaaactcctgaactcaggcgatccgcctacctcggcttcccaaagtgctgggattacaggtgtcagctaccacgcccgacccacaggcagccctttcacctcacgccgagcacgtctcctccatccatgaacattttgcaacttttttttaaagagacaggttcatactatgttgtctagattggactcaaactcctgggctcaagctttcccaagtagcttgaacctcttaagtaactgtgactacaagtgcacctggccactttttctgagacggagtctcgctctgtcacccaagtggagtgcagtggcatgatctccgcccactgcgagctccgcctcctgggttcacgccattctcctgcctcaccctcctgagtagctgggactacaggcacccgccaccacgcctggctaattttttttgtatttttagtagagaccgggtttcaccgtgttagccaggatggtctcgatctcctgactttgtgatccgcccgcctcggcctcccaaagtgctgggattacaggcgtgagccaccgcgcctggcccacctgcccattttttaaaaactttattcttcctggtatcaaggggagaaagaaaaaaattttttaaaatatttaaaactttattttgaaataatttcaaaatcacagcagtttgaagggtacaacaaagaacattttgccacattttctctttcattcgttccctcctcttctccctcacccctgtttcttcctatcctctctgaaccatgaaccatttgaggattatttgtatacatcatgctcgtttatccgtaagatgttttagtgaacatttcccaagaacagggacagcctctcacatgcccatggtacagttctcaaattcaggaaatgtgtaatattctctgatcagcccaggagttgctaatttgtagttcctgtttcaaatttgccaactgtcccaataatgattttgaaagccgttgtttttctggtccaggatccaatccaggatcaagcgctgcctttagttgtcctctctgcagcctcctttcgtttggagcaggtcctcagcctttctgtctttcatgacattgatgtttgtgaagagtacagtccagtttctgttgtagaacgtccttgaagttggtcccggaatatttgtttaaagtgagttgggaaaccacattcacatgtcttttggttatgtgtgtatttgtcaaacagccagccttgtgctgcgtgctgtgatggggagcattactcaacagagcctggccctgaccttggggatgtagtttgggtttgtggggaaagcagctaccgccaggtgggctttacggacccctgtgtgtctcatgactagaggcactgacgcttggataaatacatactggatggatgcaggatgagtccgcattctagaagtgtgcagaggtacagaagtggccctgctccctgtccagcacccagtcatcagctttccctggcttcccgaggcaccctgacgttcacactccaaacacaaagtcttctctcaggaatctcgagtgagctgcagtctgggttctagccctgccctagcagggatctgctcagtgactgggctgctctcttcctgctttaggccaatgcgggggagaggagaccactgtgactctccccagtgcccttggagcgcagaatgaagtgaggggaggaggagggtcacgagccctggagcgctgggaagacaggctgtaggccgcaggccccgatcctgcctgggacgaggttcaacagaagtaggatggtttcatcatgacctggcaggaaaaccaccagacctggaattttgcttttacaactgtttaacttctgtttcatacaggatggaaaccggtgaattgtaatctcacataaccgagcaagatctagtagtcataagcactttgtcagagcaaagcagacaaggcaaagtgttggaaatgtcatcggatcttcacagaaccttagccaagcagcctttcaatgcgagaaacaaaataacatggatttttatctagtaatgaagtcaacaccattgtccaccctgggttaacacattcacatctcaaagcgaatggggctgcagacactcatgttagagagccttggaatgtcctgcctttttacgtttaattaaaattaaataaaatatacaaaattcagttcatcagttgttctagtggcattttaagggtttagtaccatatgtggctcatgagtaccatcctggacagcgtcgacctagagcagttccatccccgcgcagagttctgtttgacggcgccactctgcacttccagcagcctggggagcaggggtgcaggagagttccttctgtgtcacagacttggtcacacagtacagatctcagatcagcacttaaacacgactgccagctgtcaacggcgtgttctgtggaatgctgggatgcatcacaggtatgctggaagatgtatagaattttacttctgttattctggtaactcagagtcctgttcagtcagtttccacgtcaggwtgctgtcctggttttaaagagaatgaacgcagccgaagttgaatcgaggcagtgatttcactcagtgcgttgggtctttccactcacctggccctccagaaccccagggccttgagtgcatgggctggtacaagagcccagtttttggctggggaggcacttcctatgggagggggacgcctgtctcagtgctgaggcaaccaccaccgaggaccctgggctggaagctgggctgagatgtctggtggtaggttctgaggcaggacaggggaccgactcaaatggatgatacgaacggcaggctggattcacgttgctcctgcacctccagcatctgctgaggacacctagaactgtggccctggccaaacctcagctccctattccatgaaagtgtgggtcaaagtgtgggtggtagagtggggctgacagtggcccctaagctcctagggtccagcccacaactgaggaagccacacggctggttgtgtacgagccggagtgtctctgtttggttgaaagtgccggtctgtgggtccttgctggtgtgtgtgcttctgtccccgcctcctggcctcctggctgaggggaagctgagtgggccacggcccatgtgtygcactcgcctcggctcccacacagccgcctctgctccagcaaggatgtggctcttccacactctgctctgcatagccagtaagtcctctcacccgctgcttcgaggggctsctgtgccctcagctccagccaggtgtctgcagactacagccttgactgtctgtctctgatggggctcagttagagccagaggttagagagtggcagctcctccaggaaaggagtcttgctcggtgggtcagrgccccaggcwtgttgggaagggcggctgaggcttcrtgttgccagttctgtcagccagggcctttggactccagggctctgccattctgttcctcctccagccagcctccccccgccaccgaggccctctccccatggcacccacttggggcaggtccttgactctgtagtttgttctctgagtgtggaggctccgcctggcagagctcccttctgttacagagcaggggttgggctgatgagggtgaggaccctgtgagagagtgttgaccagagactgggggcaagtgtctgtatggtagagggtgtgagtgttggcagggagcctgcttcctgtgttgtcaggcccagggtaaaaactggaatgtggggtggggggaggcacttctgctgcctggggggtcccattttagcctttaactgtcccatggaagcctctgggcaagccaagccatgartcctttcgggggccccctgtgatgagacagcacggtcaggtgagcccctggaggctgctaagattaagccggaggccagggtggtcctgcctagtgatctgagcagacttcccatgggtctcctgcccctgctcaggaggttggccggagaattggatgggcatcaagcttatgtggatgaaaggctcctggtagctgagttctccctgaaagatgggctgaggctgtgctgggaggggacttgggattagcatcccacctggggccagatcacccaggaagcaggccacaatgtgtagggtaccagcaaggaacacgtttttggacagattttaatattttatatttcattttattttattttattttttgagacagagtcttgctctgytgcccaggctggagcccaggctggatcttggctcaccataacttctgcctcccaggttcaagcagttctcctgcctcagcctcccgagtagctgggawtacagrygcctgccaccasgcctggctratttttgtatttttagtagagacagggtctcaccatattggtcaggctggtctcctgccctcaggtgatcgacctgcctcggcctcccaaagtgttgggactacaggcatgagccaccttgcccggcctaatattttatatttcaaaaacatcagaatagtcaccatggaaaggtcaacagtttgttgaacttccttttattttacaatttagacttctctgtttttagttacatgtggggtgtggagagagtctcactctttttatggcttgtggctttgatctcccattaccaagaatatctggagcagatgcttagactagactcttgtctaccctctcccagtacagaggaggtgactggggcacagagcgggcagtgactacccaggcttgcaagcaactgataatagacacgaggctcaagcccaggcctctgtcctgcctcccagctccagaatactcctgtggctcatctgtctcctttagcctctgagaccaccacccatcacctcagtgccttttccagcaggtggcatcgatcaaacctcttttgaggcctaggcccttcccaagctgatgggcagcagagagcgatgatggagcagacttgccatgagaccacttagcccacagctcagctcagccacgggaaggggaccagagcagggcccccgcagctccggtgtgggtggcggaaacgaggctgctgcagttctgctccatgctgtgaggtcctgagactaggatgggccagtccaggagagtttcctggaggaggtgaggtggcgttgagtcttgggggctgaggagagtctgagaaagaaaatgtccaggagatgctgggaggaagaactccctcagactgtggctccaggcccagcaccctgtaccctgtgccgggttgggcctccttaggctggagagaatccaggactggcctggcctggccctgaccttccactctctccaggccagccactctggtgatgcctacttcttatttgtggcagcagacggaataatagcagttgtctaagggagattttagaagcattgggtgcagacagacactgaaaccctggaactgtccacaccctgaccaccagccccatcatgccctcttaccctgtggcctgctgtccccaagtcagtcttcacccctgactcattctgcagtcacatcaactcacttctccatcctgggtctcagaggttgagtttccacccttgcgtgaagaagcctgtcctgtcagcctacaacaccttacaggggtgaagaagaaggaaccagaagtccagggcccgctctgctggtggcacgcactcgggctgaggccaggggctgtgccggggcatcaccccgggcctgtgcgtgatagaaaacctcagtccttggggagtgggagactgtagcatctgaggtgggctctgaaggacggggaggtccttggcaagtacaggctgggggtgagcagaggggccttctgtgcaggggggataggagggaccaagccctggggtgtgaagagtctggtttgtaggaagatggaggcgaagtgtgagtgggagcaggagattgtctcctctggtgttgctttcccttccagccccgccccaaatcgggacatgctgggccctggaggtgcgggcagaggcgaggccacccctatcccagcccctgtgtgaagagaaggcaggttgtgcacacagtagcctccccggccccggcagggtgtcacagcacgggggtagggaaggggcactccaggcagaggggcagcccaagcaaaggtgaaatgcccccggaatgcagtgtgtgggggagagctggctgggggagtgtgggccgtgtgggagccccacatccctgcccttctctgggaggcctgcattcgtgtggcaggtgtggtataagtggaggaatgcgggcatccagtcccgagaggcccacggtggaggtggtgaggaacgtggggacctgagtgccggcctgggggagcttggagttcctgctgagggcagtggggagccacagaaggtcttgaccaggatggcgacagaattgtatgttgtgtgttagttggaatctgggggagaggggaggcagagaggcccgtgaggaggctgctgccttggccccatctgcggctgttgcggaaggcagacgtggggaggaggacacactcatgagaaacgtttagtttcctggccaggcacggtggctcacgcctgaaatcccagcactatgggaggccaaggcgggcagagcacttgtgatcaggagttcaagaccatcctggccaacacggtgaaaccccgtctctactaaaaatacaaaaatgagccaggcatggtggtgcgcacctgtaattccagctacttgggaggctgaggcaggagaattgcttgaacccaggaggcrgaggttgcagtgagctgagatcacaccactgcactccagcctggaagacagagagagacaccgtctcaaaaaaaaaaaaaaggccaggcgcagtggctcahgcctgtaatcccagcactttaggaggccaaggtgggcagatcatgaggtcagragatcgagaccatcctggctaacacagtgaaactccgtctctactaaaaacacaaaaaattakctgggcatggtggcgggtgcctgtartcccmgctactcgggaggctgaggcaggagaatggcgtgaacccgggaggcggagcttgcagtgagccgagattgcgccactgcactccagcctgggcgacagagcgagactccgtctcaaaaaaaaaaaaaaaawatawatatatatatatatatatttagtttccagcacacagtagtgctcaaggcctgttggcctttcttgttattagggagatgaagggtgagggagagagatgggctcagctgactgtgaggtttggggtggagttgatgaggctccgtgtagaagatcgaggtggggggactgcggctggctgcagatggctctgaggcacagtgctcccacgaggccccgctgggtgttctgggcggggtgtcgggacccctgcatctagccccacttcttcagctcctggtatcagtgtgggcaaakcatgccccatgggcctcggtttcctaaattgggaatcgtggtacttattgtactgtgagaatgtgagttgaaattgcccggagtgctgggggagacagagggttgaggggagacagtggtggctgacaggatggagggggatctcggtctgactcagcaggcctccgtggctggggacagctcagagaggtggtcctgtgggtagtgtggtgacagacactggtgtagctatgtctgtaagtcagacaacacgggaggggggattgggagggagggccagccctcgcctgtggttataactctctccaacctcagcctccacgtgctgagcctcctgcgtcagacctggggccgcgtatcgccccatttgatctgcacagccccatgtcccagaggggagacggaagcgaggtgccaagcccagggtccttcagtgactccaaggcagtgaggatttgaactcaagaccatctaccaagacaatgctgttttctgagtcctggtgggaaatgcaacaggaggtggtttcctgatggaggcgcagctcaaaggcaaactgttgggcctggggcgagtccagtctgaggaaacaagctgagccaggcctggcagacctgggcaccagctggctctcagggaaagcccagcaaatacagcgaactaccccaccacacacacacacacacacacacacacacacacacacacggatgcacacacacacacacggatgcacacacatggatgcacacacacacggatgcacacacacagggatgcacacacacggatgcatacacagggatgcacaaacacggatgcacacacagatgcacacacggatgcacacgcacacacgcgcacatggatgcacacacggatgcacacacacagatgcacacacggatgcacacacgcacacacagggatgcacacacggatgcacacacacggatgcacacacacggatgcgcatacacagatgcacacacacggatgcacacgcacacggatgcacatggatgcacacacacggatgcacacatgcacacacagggatgcacacggatgcacacaagcacacacggatgcacacacatgcacacacacacgtacacagtctcatgccaccgtgcctctgcggcaggctcttgctgacctagttaccagccctgtaagcagagccctgctccagctcagtgagccgccgcacggcaggagcagtgcccagcttcttgaggccatttgtgaccctggcctctctctgtttaccaacccctcggtgcctccagctattactaaaggctttgaaatcgggcataaacacagaatctgagccccagacacaaatattcaatcttccgacgggccatgcacaaaccacacccctctctgagcctcagcacctagcgtggtgcctggaaggcaacaggtgctctgggggagcggaaccctcagttgaacaagatctctgttgaacaaagtgaacacaggggtggggtggcgtgaggaaagggaatatctggcccactctgacctttttagagcaccttttttgggtgggcctggccctgcgctgagctgggctctgtggctgggggtgttgtgtgtgactcagatcacatcacagttcagggcagacaaactgaatcacagatcaccctgatccagacagaatttggtcacagccagacagaccacaggatgctgagggggctcagggtttggtcagagccagacagaccacagggtgctgagggggctcagggacccgggagttactctgactgagtctggattggctcctggctcctggctggctgagcagggccacaaaagacgggctttgcagacagaggtggagagtgctgagcaggcctgctgggtggagggagccgctgtgtcgaggcctggaggcaggagtgtgcagagggtgcgccgggcagagcgggggggtgccacggacgcccaggagaggagactggactttgctctgcggcctccactcgtgccttttcagttataccgacagtgaaacggggggaagaaggccccccacccacccctcgtaacatgttggcagctcgcactttttaattctcctctaggcagtttgctgacgtcctgttttttccccagagtgactgaccaggaggcacagggctcaacgtgacgtgggccccggggccggagcccagactccctrctgggcrtcctttatctcagttctggattcgtgggggagcagcgggaacagtacggccttcttccctgcctaggggtcttgatctggaacctttgagagtctatgtaggctgtaagtggccactctcccagcacctaccgagggtgggccaccatgccaggccctgagataatgtggcgatcgaggcagatgcagtgtgtgcccccttggactcactggtggcagggggcagtcactggcaatagggaaacaaggaaggccaagcacagtggctcactcctgtaatcccagcacttagggaggccaagactggaggatcacttgagcccaggaatttgagtccagcctggacaacatagcaagacccccatctctacaaaaaatttaaaaaaaaattagaggccaggcacggtggctcacgcctgtaattccagcactttaggaggccgaggcgggcggatcacaaggtcaggagttcaagatcagcctgaccaacatggcaaaaccccgtctctactaaaaatacaaaaattagtccggtgtggtggcaggtgcctgtaatcccagctacttgggaggcttaggcaggagaatcgcttgaacccaggaggcggaggttgcaatgagccgagatcgtgccattgcactccagcctgggcgacaatagcaagactccatctcaaaaaaaaaaaaaaaaaaaaaggatgaagaggaagccaggagacaggctgaggacagagcacttcaatcaggcaaggggaggattttgtacacatgtgcactcaggggatcaggaagggctccaatgcttccatcagattctcaaagggggccaggtgcagtggctcacacctgtaatcccagcactttgggaggccaaggtggtggatcacgaggccaggagttcgagaccatcccggctaacacggtgaaaccacatctctactaaaaatacaaaaattagccaggagtgctggcatgtgcctgtagtcccagctactccagagacccagtattttgagtcctggcctacactcggtaggtgctgggagagtggccacttacagcctacatagactctcaaaggttccagatcaagacccctaggcagggaagaaggctgtactgttcctgctgctcccccacgaatccagagctgagataagggatgcccagtagggagtctgggctccggccctagggcccacgtgagacaggagaatcacttgaactgaggaggtgggggttgcggtgagccaagatcacaccattgcagtccagcctgggtgacagagtgagactccaactcaaaatgaagaaaaaaaggccgggcatgatggctcacacctgtaatcccagcactttggaggctgaggcaggtggatcaggacgtcaggagatggagaccagcctggccaatatggcgaaaccccatctctactaaaaatacaaaaaattagctgggcatggtgatgggcacctgttttcccagctactcaggaggctgaggcaggagaatcgcttgaacrcgggaggcggaggttgcagtgagacgaaagttgtgccactgcattccagcctgggcgacagagtgagactctgtctaaaaaaaaaagaaaaaagaaaaagattctcaaagggatccattacccccaaacaagaacgtctggtctggttatgtttcctgtgttttctactttggggcattggcagggaggacacaaatcacaggtctgcaaaagctggggtgcagggtttcttcattgtgttctcacaaaggacccttagggacagttttttctctgatttgaataaccagactggttgtgctttgcctggaagtgttttgttttttgaattttgtggacaccgcatggcattaactgatctttttcatgttgatatcaccttcaagaaagcttcattcattcatgtatgcgttgaatcaacaaatgattttattaagccaaaggattttaggaacacttctgtgagccagcgctgtgttcagagccaacagtggggcacgtgatagaaagtgctggcactgcgtgatctacatgttagctgttggcctccttcctggcttgttgtatccccctctttttttaaaccatcattttccttctgttcttttttgcctgccccattattttaagcgagttttatcttacctgtattatgtatttttatgaatcaccacaaatcattccaggcgaggcagagatgtgaagaaaaaggaataaaatatagatatcaggccgggcgcggtggctcacgcgtgtaatcccagcactttgggaggccaaggcgggcggatcacctgaggagttcaataccagcctgggcaatayggtgaaaccccacctctactaaaaatacaaaaattatccaggtgtggtggtgcgtgcctataatcccagctactcaggaggccgaggcaggagaatcgcttgaacccgggaggcagaggctgcagtgagccgagatcgcgccactgccctccagcctgggcaacagggccagactccatctcaaaaaataaatacataaataaaataaaattaaatatagatatctactttgtgccagactcagggaaatggccttaaatgcagggatgagagatccagagcctggcctcagagccatctccccaggttcctcctcctcctcaagtctggaaggttgatttttggataataaaattttaagcatgtacacaggtaaacgagataactataacaaagccaatatgtccatcaagcggatgacacaatgatcaagatcctgccacacaagctgaatgtattttgtgttccccttttcatttttgttgtcaaggtatttaaagcctggctgctcaaaatgtgacctgaggaccagcagtgagagcatcgtctgggagcttgttggaacagactcccagccccattctgattcattatctgctgagtcagaatctgcattttaacaagatctccgatgactcatttgcacgctaatgtttcagaaacagtattttaaaccccaaacatcgtgtcatttcactcccaaaaaacatggacattttcatttctaaagaacatgaagggccgggcgtggtggctcacacctgtaatcccagcactttgggaggccgaggctggtggatcacctgaggtcaggagtttgaaatcagcctggccaacatggcgaaaccccatctctactaaaagtacaaaaattagccaggcatgttggcacacccctgtaatcccagctactcaggaggctgaggcaggagaatcacttgaatccgggagacagaggttgtagtgagctgagatcgcaccactgcactccagcctgggcaacagagtacgactcagtctcaataataaagaacgtggacattttcttaaatagccacaatgttcttaccacctaactaaattaattctttggtatcatctaataccaaatacttagtccatatacaaatctctctgtctcaaaatgtctttttttttttttttttgagacagagtctcgctctgtcgcccaggctggagtgcagtggcgcgatctctgctcactgcaagctctgcctcctgggttcacgccattctcctgcctcagcctcccaagtagctgggactagaggcgcccaccaccacgcctggctaatttttttgtagttttagtagagaaggggtttcaccgtgttagccaggacggtctcgatctcctgacctcgtgatctgcctgcctcggcctcccaaagtgctgggattacaggcgtgagccaccatgcccggcctccaaatgtctttttaacagttggtttgttcaaagcaagatccaaacaaggtccgcacatgacatgcggttgctgtggctctccgtctggagtgcacccccatccccattttctgctttcatgcctttgatttatggcagagtttggtcacgtgtgttgcagaatatctatgttcaggatttgtgtgtttgcttcctcttggtgtgatttgtctttttattccccaaactgcctgaaaactggaagtttaacgtcaggtttcagttctgtggcgagcacactctaagcagttgtgaggattttgccccacttcctgcagttatttcacctctttttcttttktgtgtgtgtgtgtgtgtgtttgtttgagacggagtcttgctctatcaccaggctggagtgcagtggygcratctcggctcactgcaacctccgcctcccaggttcaagcgaktctcctgcctcagcctcccaagcagctaggactacaggcatgcgccaccacgccyagctamtttttgtatttttagtagagatagggtttcactgtgttggctgggctggtcttgaactcctgacctcaggtgatccacccatgtcggcctcccaaaatgctgggattacaggcctgagccactgtgcctggcccttctttttcttttctttgctgaagtgttttaaagccttggtactcagaatgtggtctgaagacctgcagtgtgggtgtcccttagaatcttgttggaaatgtagtcttgggcccttasatccttcctagagtgtcacaccaagaaggacatgcctgagaggcccactcctagggatgctaagattgactagtgggctcaggtggtgtcagcctaattgtaaagttagtctatcagactctcatttagaagctttacctgttgatgatcctggcctgaattaattattgtatttcattagggctcacaaaatagtttggttctattattcttcctacatttattagtaataatttatccataaaaaagacgtttttcatgccatttttataagggccagatgaacaaatgaaaaataaatttaaggctgggtgaggtggctcacgcctgaaatcccagcatttgagaggccaagtgggggcagattacttgagatcaggagttcaagaccagcctggccaacagagtgaaactccatctctaccaaaaatacaaaattgatctgggtgtggtggcacatgcctgcaatcccagctacaggggaggttgaggcaggagaatcgcttgaacctgggaggckgaggttgcagygagccragattgcaccaytgcaytccagcctgggtgacagagcgagactccatctcaaaaaacaaaaaacaaaaaaaaagaaggaaagagagagagggaagggagggagggagggaggggggaggaaggaaggaaggaaggaaaacttaaaagacaagaagtactttttctcattaaccaggatgatttgatggccctgaaatgcacttcatgtaggaaaggcaagaaaaatgcttaatacttttcctaacagtcagttttcagagtaaagagatggtgccctttttacttccattggtagcaaattttctttttcgtttcttttttttggagacagtcttgctttgtcactcaggctggagtgctgtggtgtgatcaaggctcactgcagcctcaacttcctgggctcaagtgattctcccacctcagcctcccaagtagctaggaccacaggcaggctcccactgtgtgcagctaattttttaatttttttgtagaaacggagtctcactgtattgcccaggttggtcttgagctcccgagtgtaagtgatcctcccacctcagcctcccaaagtgctgggattacaggcgtgagtcaccttgatttcttttgtttttatttttctctctcttgtaaatatcatgaacttatgaaagttttatatattcagtgtgtttcacatacttgtaattcttattctaaaaaatattttaattataattattatttttaaataattattttaataattattatttttaaataattattttaataattattatttttaaataattattttaataattattatttttaaataattattttaataattattatttttaaataattattttaataattattatttttaaataattattttaataattattatttttaaataattattttaataattattatttttaaataattattttaataattatttttaatgtagactttttaaaagtacaacatacagaaaaatggacaaatttagatcagtaaatgttcatattaagtcacacccgtatcaagaaacagaacaggctgggcacagtggctcacacctgtaatctcagcactttgggagcccaaggtgggaggatcacctgaacctaggagttcaagaccagcttgaacaacacagtgaaacctcgcctctaccaaaaaaaaaaaaaaaaaaaaaaaaattagtcaggtctggtggcacaggcctatagtcccagctactcgaaaggctgaggcaggaaaaccacttgagcccaggaagttgaggctgcagtgaactgtgatcacaccactgcactccaggctgggcaaaagagtgacagccagtctcaaaaagcaaaaaagaaagaaaacatactgtgtacaaccttgggggctaaaaaaattttttttgaacttcattaaacttaagaacatctgtttatcaaaaaaaaaaaaaagtaagtgagtgaaaaggcaaaccacagaataagaaaataattgcaacacaaattgataaaagattaacttcagaatatgtaaagaatttctacaaatcaataagaaaaaggcatgtccacaaacagaaaaaggacatttcacaaaagagattatcaaaatagtcaggaatcttgtaaggagacttcagacgtcagagaaaggcaaattaaaaccaggtgtggtggctcacacctgtaatcccagcactttgggaggccaagacgggtggatcacctgaggtcaggagttcgagagcagcctggccaacatggcgaaaagcccatctctactaaaaatacaaaaattacccgggcgtggtggcgggcatctgtaattccaggtactcaggaggctgaggcaggagaatcacttgaactcgagaggtggagattgcagtgagctgagattgtgccatggcactccagcctgggcgacggagcaaaactccctctcaaaaaaaaaaaaaaagagaaaaccatttgtcagtatccactaaagctgaacatatgcttaacaggatccagaagttccacggttagacatatgcccaacaggaatgtgttcatatggtcatgaagacgtctgcaagacactcatagcaggccagacacagtggctcacacctggaaacccagggctttggtatgccagggcgggaggattgcttaaggccggtgtatgaaatcagcctgggcaacatagctagaccccaccgctttaattcttcatcagattaaagaaattcacagccgggcatggtggctcatgcctgtaatcccagcactttgggaggctgaggtgggcggatcacctgaggtcaggagttyaagaccagcctggccaacatggggaaaccctgtctctaataaaaatacaaaacttagscgggtgtggtggcacatgcctgtaatcccagctacttgggaggctgaggcaggagaatcgcttgaaccagggaggcggaggttgtagtgagccgagatcacaccactgcactccagcctgggcgacagagtgagactccatctcaaaaaaaaaaggaaaaaaaaaattccctctgattcctggtttgctaggactttttatcagaaattagtcttggattttatcagatgccattttctgcatctatcataatcatatgatttttaatcctttatttcctgttgtaaggagtaaactgattattttaaatgtcaaaccactcttccatttccgaaatgaactctgcttgttttgatgtatcatgctttttttttttttttttttttgagaggagtctcgctctgtcaccaggctggagtgcagtggcgcaatcttggctgactgcaacctccgcctcccgggttcaagtgatcctcctgcctcagcctcccgagtagctgggaytacaggtgtgcgccaccacgcccagctaatttttgcatttttagtagagatggagtttcaccatgttggccaggatagtctcaatctcttgacctcgtgatccgctggccttggcctcccaaagtgctgggattacaggcatgagccactgcacccggccgtattatgctttttataattccctggatttgatttactggaattttgtgcagcatttttgtatttatgttcgagagaaacggttgtttcaattttcctttcatttattgtgcttgctggattttaatatcaatgttatactggcttcataaaatgactgaaaaatgttttctcattttctattctctaaaacagtttatataaacttggcattatttctctttaaatgtttggaaaaattcgtcagtgaagctatctgggcgtagagatctccctaagatttttagtcatgagtaaaatatcttactcaggtgatacatttctttttttgttagttttggtgcatttctatttcaaggaatttgttcatttcacccagattgtcaagtttactggcataaggttggatataacatcctcttacttttttttttttttttttttgagatggagtcyctctctgtcacccaggctggagtgcagtggcgcgatctcggctcactgcaagctccgcctcccgggttcacgccattctcctgcctcagcctcccgagtagctgggactacaggcgcccgccaccacgccyggctaattttttgtattttcagtagagacggggtttcaccgtgttagccaggacggtctcgatctcctggcctcgtgatccgcccgcctcggcctcccaaagttctgggattacaggagtcagccacctcgcctggcccctctattttttaaatgtcttaggatctattatgatgtcccccctttttattttttattcatgttggtaatttgtgtgttctctttttttttttcttgttcagtattgctagtgatttatcattttaaaaatctttaaaaaaaacttcagcatcattagttttctctactgtaagttggtttgctgtttcattgatacgtgttcatatctttattccttcccgtacttcctttaggtctgatttgctattccactgtaattttatctttcaccctgggttatttagaaatgcattgcttaattttcacgaggttcagatttttctagttttccttccttccttccttccttccttccttccttccttccttccttccttccttccttccttcctccttccttccttccttcctttctttcttctttcccaagtctcactctgtgcctaggctggagtgcaatggcacgatctcggctcactgcaacctccacctccctggttcaagtgattctcctgtctcagcctcccaagtggttgggattacaggtggctgtcagcaygcctgcctgatttttgtgtttttagtagagatggggcttcaccatgttggccagggtggttttgaactcctgacctcaagtgatccgcctgcctcggcctcccaaagtgctggggttgcaggcatgagccaccatgtccggccatcttttcttccctttctttcttttttcttttttttacatggggtcttgttctgtcacccaggctggagtgcagtgatacaatcttggctcactgcaacctccacctcctgggctcaagcagtcctcccacctcagcctcctgagtagctgggaccataggtgcatgccaccattcctggctaattttttgtatttttggtagagatggagtttggtatttttgttagataccagccatgttgcccaggctggtcttgaactcctgagcttaagcaatctgcctgcctcagtcttccacagggctaggatgacaggcacgagccactgtgctggacctctagttttctttttgttattggtttagattctagtatagtcagagaacatattctgagttatttcaattcattgatatttattgaggctttagctttgtgatctagcatatggtcaattttggtaaatgtttcacgtgtacttgaaaataatgtttctgagggtgcggtggctcacgcctgtaatcccagcactttaggaggctgaggtgggtggatcacgaggtcaagagattgagaccatcctggccaacatggtgaaaccccgtctctactaaaaatacaaaaattaggcgggcatggtggcgcgtgcctgtagttccagctactcgggaggctgaggcagaagaatcgcttgaacctgggaagcggaggttgcagtcagccaagattgcaccactgcactccagcctggtgacagagccagactccgtctcaaaaaaaaaagaaaaatgtttctttttccattgttgggtacagagttttgtctgtcaggtcaactttgctaattatgttgttcatatcttctatatccttgctcaatttttggtctgcttttatttttatttttttattttattttttttttttgagatggagtcttgctctgttgcccaggcgggagtgcagtggcgcaatctcggctcactgcaagctccgcctcccgggttcacgccattctcctgcctcaacctcccgagtagctgggactacaggcgcccgccaccacgcccggctaattttttgtatttttagtagagacggggtttcaccgtgttagccaggatggtcttgatctcctgacctcgtgatccgcccgcctcggcctcccaaagtgctgggattacaggcgtgagccgccgcgccccgctggtctgcttttatagttgacgtaaaaggcttaattaaagtgttaaagtctcccactttcattgtagtgttttgtatttttccttttaattcagtcaatttttgcttttatattttgaaatgatgttattggataaatacagatttaaaattgtcacrtcttcytagtgaatcaaaaacaacatatttgtgtgcatatatctccttcccttccttatacagaagctagtgtcgtttatacacttgtccttcatgtagtgattttaatttcttcctgaaatctactgctgagtaaacagccattaattggaaaaaatatttgcatcaatttcattaaaaaaattgtgatgcattccagccaaccaaagatactcaaatgacttttactgttaggaaaatgtattaattgaccaataaaacaagtttagataaataaaaacaatactttgaatataaaaatacagtttccgtataaaatgtattgtcatgaaggtttattggcctcattaaaaggagaagacaagatttgacagtgggggctaggcgcggtggctcacgcctgtaatcccagcactttgggaggctgaggcgggcggatctcttgaggtcaggacgagtatgagaccagcctggccaacatggtgaaacctcgtctctactaataatacaaaacttagctgggcrtggtggcgggygcctgtaatcccagctactccggagactgaggcaggagaattgcttgaacccaagagccagaggttgmggtgagccaagatcgcgccaccgcactccagcttgggcgacagagtgagactccatctcaaaaaaataaaaataaaaaataaagtcatagcaaaagttacagagaaacaccttgagggcaaaataaatactgaacccaaaagcacttccaaacacatggaaataggctgtgcgctcatcgacttcagaatcatagaatcttcagccatctcaatcgacatacatcagcaaaagcaggcatatgggatttatccaaacatgacatgcaacgcagatttgttccatatgatattgttggactagaaactgttacatagtaagtaaatgggtgagtgtgtcttcccgtgagagtgcgatgtcaaatgtcattccttatatcgtgtttactcagtgtatttagagaygaaaaagtcactaaaccaaaaaaaggagtgttgccaagaagttgtatagcttttcaagagtgtttatggcaaaagtcgttaattgaacagtaattgaacaggtaartctgtaaactggamttcaccttgcttttttcccatgyaaatgtagattagagatgggagcagtggctcacacctgtaatcccagcacgttgaacggctgaatcacctgagrtcaggagttygagaccagcctggccaacacggtgaaaacctatctctactaaaaatacaaaaattagctgggggtggtggtgtgtacctgtaatcccggctacttgggaggctgaggcaggagaatcgcttgatcctgggaggcgaaggtgtcagtgagctgagattgcaccattgtactctagctcgggcgacaagagcgaaactccatctcaaaaaaaaaaaagtacacacacacacacacagagatttaagcaatggagtggcatggtcagaccatgctttgttttttttttttttttttttttttgaggccgagtctcactctctcacccgggctggagtgcaatggcgcgatgtcagttcaccgcaacctgtgcctcccaggttcaagcgattctcccttgtcagcctcccgagtagctgggattataggcacccgccaccatgcccggctaatttttgtatttttagtagagacagtgtttcaccacattggtcaggctggtctcaaactcctgacctcaggtgatccaccgcctcagcctcccaaaatgttgggattataggcatgagccaccgcacccggcccagaccatgcttttaaaaaatctttctagcatctgatgtggagaggatgtatccagaagtacaagtcttgaaagaggccaggagactaacgtgtccaagcaaaagacgatgaggtcagtggggcagagctgagtcctgacagaggcccaaatgtgcatgtgaattctgaggatgataaaggtagcatttccaaactatgggttaagaggagctactcaacaaataatgatgagacatttcaactgtgggaaaaaagtaaagttgtatccctatttcactccaaatgtaaaaataaaatccagatggacaaaaggttcgaacataagaaattaaagaagagaccgggccttggctcacgcctgtaatcccagcactttgggaggctgaggcgggcrgatcacctgaggtcaggagttcaagaccatcctggccaacgtggtgaaaccccgtctctactaaaatacaatattagccgggcatgatggcgggtgcctgtaatcccagctatttgggaggcttaagaggctcagatgggagaatcccttgaacccgggagatggtggttgcagtgagccgagatagcgccactgcactccagcctgggcggctcagcgagactttatctcaaaaaaaaaagaaagaaagaaaaaagaaatgaaagaagaaaaaaaatatagaaggaaacatgagtggatgaaaagaaatagcctgagtggaggagcatgacccgaagctgaagtcataaaggaaaaacaatatgacaacatcaaaaaacgtagttgtgggggaaaacagcatatgcaagacaaacagctgcgtgagaagcggcatctataacacattgcctgtttctcttggatagagaaaagctcttacaaataaataagaaagtaatatcgtttcatgaaaatgaataatgtacatgagtaggcagtaaacaaacttacaaaaagagacttgacctcactcataatttaaaaatagttttggggctgagcttgttggctgacgcctataatcccagcacttggggaggctgagatggcaggattacttgagcccaggagttggagaccagcctgggcaacatagtgagacaccatctctacaaaaaattttttaaaaattagccaggcctgctggtgcgcatctgtggtcccagctacttgagaggctgaggcgggaggatggattgagccctggaggtaaagactgtagggaaccatgatcatgccactgcactccagccagggcaacagagtgagatcttgtctcaataaaataaaaagtaaaaaatatttgggaggctgaggcgggcggatcatctgaagtcgggagttcgagaccagcttaaccaaaatggagaaactccgtctctactgaaaatacaaaaattggccgggtgcagtggctcaygcctgtaatcccagcactttgggaggccgaggtgggcggatcagctgaggtcaggagttcgaaactagcctgaccaacatggagaaaccccatctctactaaaaatacaaaattaggccaggcgcggtggctcaygcctgtaatcccagcactttgggaggccgaggtgggcggatcacgaggtcaggagatcgagaccaacctggcttaacacggtgaaaccccctctctactaaaaatacaaaaaattagccgggcaggcgcctgtagtcacagstactcaggaggctgaggcaggagaatggtgtgaacctgggaggcaaagcttgcagtgagctgagatctcgcctctgcgctccagcctgggtgacagagtgtgactccatttccaaaaaaaaaaaaaaaacaaataaacaaacaaacaaaaaaaccaaaaattagccgggcatggtggcacatgcctgtaatcccagctacwcgggaggctgaggcagragaatcgctrgaacctgggaggcagaggttgcggtgagccgagatsgtgccactgcactccagcctgggcaacaagagcgaaactccatcttaaaaaaataataataattttggaacaagatgatgatatactcttaaaacaaggatgaaaatgtcttcacagtcagtccaggcaacactgggggagataaaccttctcccatgctgtcgttggagtatgaattggcaaaacctctttgggaggtaatctatcgatatctatttttccccaaaaaattttaaatgaaaaatttcaaatatatagaaaagttgaaaaattatatggtggacaaccacatcactacacttaaatttgacaattgtcaacacttttgagtgtttcttttatcacgtatatctatctacccatccagcaagccatcttatattttgatgcattttaaagtaaattgcacgctggatgtggtggctcacacctgtaatcccagcrctttsggaggccaaggcaggtggatcacttgaggtcaggagttcgaaaccagctcggtcaacattgtgaaaccctgtctctactaaaaatacaaaaaattagccgggcatggtggcaggcgcctgtaatcccagctatgtgggaggctgagacaggagaatcgcttgaacccgggacacagaagttgtagtgagccaagattgcaccactgcactccagcctgggcgasagagcaagaccccatctcaaaaaaaaaaaagaaattaataaaaataaattgctgacttaagtataattcaactctaaacatttcagcatacatatcaacaaaatgtgtttgtgcttcttctttaaggtaatatttacatacagtgacatgcacaaattctaagtggaccattcattgcgtgtgttctgacacatgcacaccttggtaattcaaacacctatcaagatatagaatattttcatcattccagaaagttccttctagtcccttcccagttagtcccatcctctcaagcatttttttttttttactataggttagttttgctggttctagaacctcatataaatggagttatacaatatgatttttattgccttagcttaacaaatctgctgtgctctgtttgaattccctttccctacatcagggtcataaaattcctccagaaagaaagctgagggtaacgacagggctcgtgttatttgtccatgttttctagagatcactgtcctgctctgcccattgtcaaatgtctgaaaacattttataggttttgtccagtattctagttgtttatggtgaaagaattagtccagtaccaatgatttcttcatggaaaggccaaataagggacactttgagaaccaatatagtgataacagattataaccattgaataaaatagaattcatgagcctattctgctgtaaataaaaaaaatcacacataaatgagaagaaagaaggaagacctaaggcttctgtcactcagcataatgatatttgttgttgttgttttgagacggagtcttgctctgttgctcaggctggagtgcagcggtgcaatctcggctcactgcaacctctgcctcccaggtttaagcaattctcctgcctcagccttctgagtagctgggattacaggaacgtgccaccgcgcccagctaatttttgcgtttttcgtagagacagggtttcatcatgttggccaggcyggtctcgaactcctgacctcaagtgatccagccgcctcggcctcccaaagtgctgggattacaggcatgagccactggcgcgcggccagcataatgatttttgggattcatcacgctgctgtatctgttgttgactcctctttactcctgagtaggattctactgtaggaatataccacagtgggcttttccagtctcctgttgatggacatttgggttgtttgcagtttggggctcttccgaataaagctggtataaaacattcttgtgcaggcagttttggggatacgttttctcgtgggtcgcttgaagggggtacatagaacatacacaggccctcttcctggggctcacagtctactgtaacttcagtacaagacgcagtgacgtgagtacacgctgtgtgtcaggtgcagaaatgacagtaagaggcgtgaggaggtgggaagtgcttctttggggagagctaggggcggcttcttggaggaggggggctcgggtactggtacagcttggtttagtaggaggatcagaggctstgggtcagatacacctgcgtctagtctttctctctcacacacacataaagatccctgggcagtctcacttttctcagctgtaaaacggggttcatgacaccacaggatttgctggaataacgggagtaaaaggcctctttcattaaacgctcctcttttccctacaggcctggccctgctggccgctttcaatgtggatgtggcccggccctggctcacgcccaagggaggtgcccctttcgtgctcagctcccttctgcaccaagaccccagcaccaaccagacctggtgagtagggccggtgggcaagaggccttcagactgaggggcttccaggcaatctgagatgggccccagagacggccatggcagcccaccccaccccaccgtcaggagaggaactcctttctctttcagaagggcatgcaggagaaagagagaaggtgtgagagaggctgtgggcatcgggctggtctgtggggtccacggaaccccagcctcacgcctcactgggcctctccctgctccattgcccagggggagggtggacttaaagacaattttagtggcygggcacggtggctcacgcctgtaatcccagcactttgggaggccgaggcgggcggatcacgaggtcaggagattgagaccatcctggctaacacggtgaaaccctgtctctactaaaaaatagaaaaaattagccaggcgaggaggcgggcgcctgtagtcccagctactcaggaggctgaggcaggagaatggcgtgaacccgggaggcggagcttgcagtgaaccgagatggcrccactgcactccagcctgggcgacagagcgagactccrtctcaaaaaaaaaaaaaaaagacaattttaaaataaagcatattaaggctcttttgttccttatggaagtaacacatgttcaatatagaacatttggaaacaaaaaataacaaagaaaaaactgggcctggcaccgtggctcacgcctgtaatctcaacacttagggaggctgaagctggaggatttcttgaggccaggagttcaagaccaccctgggcaacatagtgagacccccccaactcaaaaaaaaccaaaaactgtctgggcatggtggtgcctgcctgtagtctcagctacttgggaggctgaggcaggaggaccacttgggcccggaggccgaggctgtagggagccgtgattgcaccactgcactccggcctgtctccagaacaaaaaccctgaaactatgaggaacaagcgtgtactggtaagaggcaggctgtggctctggcagccagggttcagtggcagcttcaccgtggatttgccgcatagcctgagcaaggtgctcgggcctgagcttcagtttcccttctctgcagtcagcgtggggawctacctacttcacaggattgtcgcaaagactatttgagataatgcaygtaaagggcttagcacaggttctgccgggcgcggtggctcacgcctgtaatcccagcactttgggaggccgaggcgggcggatcatttgaggtcaggagttggagaccagcctggccaacatggtgaaaccccgtctctactaaaaatacaaaaattatctgggcgtggtggtacacgcgcgtagtcccagctactcgggaggctgaggcaggagaattgcttgaacctgggaggtgsaggttgcrgtgagccaagatcgtgccattgcactacagcctgggcgacagarcaagactccgtctcaaaaaaaaaaaaaaaaaaaaagggcttagcacaatttctggccacattaatgctcaataaacattactttacattttttaaatatcatctatacccacctattagataagcaaaatgtaaaatctgccaacattgctggtaaggttgcggtgaaacagggacgtgtgggagtgtgaattgcgatcaccaccttggagagcaattttgccgtatctggtaaagctgaggatgcacgtggcctctgacacttccactccccgatcccagctctagagaaattctcagacacatataaaaatgtttgtgtgccgggcgcagtggctcacacctgtaatcccagmactttgggaggccgaggccggtggatcacctgaggtcaggaattcgagacctaggctggccaacctggcgaaaccccgtctccactaaagatacaaaaaaaaaaaaaattagctgggtgtggtggcgggcgcctgtaatcccaggttcttgggaggctgaggcaggagaattgcttgaacccaggaggtggaggctgcagtgagccgagatcgtgccattgcactccagcctgggtgacggagcgagactctgtctcagaaaaagaaaagcaagcaaaaaatgtttgtggtagcattgtttggaatcatgaaagactggcaatattcctcttaggaaaatgggaaaaatactgatatgactcatgcaatgcaatactaaaagcagatcccctgaatgaagccagtgcaatggttgtttacctggatccatctggaaacataccgtgagttgaaaaaggcaagttgtagaatttaatatacaaaggttggcaggtgcagtggctcacctgtaatcctagcactttgggaggtcaaggcgggtggatcacatgagcccaggagttcgagaccagcctgggtaacacggtgagaccctgtctacaaaaaatataaaaaaatcagccggatatggtggtttaagcctgtagtccgtcccagctattgggaggctgaagtgagagacctgcctgagcccgggggcgggtgggtcgaggctgcagtgagccgcgattgtgccactgcacttcagcctgggtgacagaacgagaccctgtctcaaaaaaaaaagaagcaagtaagtaaaatatgcattccctcagatggcgatggtggccgcgtgctgatgtaggagtgtgtctgcagttaggagaagctctggtggaaagggtcatgagatccgaggctcatttgaatttcccatgtgtcaccaaaatgacttttatttatttctttacctattatttatttattggagacagagtcttgctctgtcacccaggctggagtgcagtggtgtaatctcagctcactgcaacctccgcctccygggttcaagtgattctcctgcctcagcctcctgagtagctgggattacaggcgcccgccaccacgcccagctaattttttgtatttttagtagaaacagggtttcgccacgttggccaggatggtcttgaactcctgacctcaaatgatctgcccacttcggcctcccaaagtgctgggattacaggcatkagccaccgcacctggccccaaaatgacttctagtgctgtgttgttttaaagccagatctggtcaaggtttatgtattacgtattgctgttatgtctctgtcattgatttcaatccaaagcagtgatttctcccccatttttttctgggtggtcatagggcttttcttgtgcatactctcccactgagcgggcccagcctaggatggttacctcctcatcccaccccagcccaccagattgctttgctcctggtcagtggtcaagggtttccttcacacccagcacacaggagcaagtgagcccagggttcaaacaggcactggggcagagccaggtgaggagccagggttcctggstgggcagggcgggagctttgcttgaataggatgggtgggcagtggtggctcccgaagcagcctcataggccctgggacttgggccttgaccctgacagccaggcagacttggatcctgtgatactgtgaaatgtatatttgacattccaagactgaatatatattttacaatataacaaataaaaatatatttggtctcaaaataaacatttggtcccattatctggcatacaygcctaaaatctctggaatctccaaagtaataaatgtctttttctttgttaatgagttgacgggggaccggcagcccccagatagcttcaaaatgggggctggtcactggagagaaccaggcacgatcagagggttgggactttcagccccacacccctcttctgggagagaagggctgaaggtttagttgatcaccagcggccartgattcaatsagtcatgcctatgtaatgaggcctccataaaactcaaaaggacagggtttggggagcttctgggtagcagaacatgtggaagtttctggagggtggccccygagagggcatggaagctttgcccctcacccccactttgcccctcacccccactttgccttatgcatctcctcatctgtatcctttgtaatatcttttttttttctttttgaggcagagtcttgctctgccacccaggctggagtgtggtggcatgctctcggctcactgcaaccactgggttcaagcgattctcctgcctcagcctccctagtagctgagattacaggcgccygccaccacgcccatctgagttttgtatttttagtagagacggggtttcaccaatgttggccargctggtctcgaactcctgacctcgtgatccgcccgcctcggcytctcaaagtgctgggattacaggcgtgagccaaggcacctggcctgtaatatcctttataataaaccagtaaatgtcggtaagtgcttctctgagttctctgagccactctagcaaattaagcccaaggaaagggtcccagaaaccctgatatggttgtttggtcgaaagcacaggtgaaataaccggcggctggtgatgggcctcggaagttaggagcagtcttgtgggactgagacctcgacctgtgagggctgatgctacctccaggtggagcatgtcggaattgagttgaacgtgaggaccttcagctggagctggttgccgaaggactgcttgccccgtgtggagggaaaaccccacccacctggggtcactggactgttctgtgttgtgagagctgcaggggagacagagctcgacgtttcctacatcattagagagtcctttctggatcctggtttcatcggtgcagtcaaaagtctggtcactgccaggcgcggtggctcacgcctgtaatcccagcactttgggaggctgaggcgggcagatcatttgaggtcaggagtttgagatcagcctggccaatatgctgaagccttgtccctactaaaaatacaaaaattatctgggcgtggtggcgcgcacctgtagtcccagctgcttgggaggctgaggcaggagaatggcatgaacgcgggaggcggagcttgcagtgagccgagatcgcgccactgcactccagcctgggcgacagtgagactccgtctcaaaaaaaaaaaaaaaagtctgctcaccattagatttaagtggtaaggatggggccaattcattcattcattcattcattcattcagcaagtatggatggagcacttactcagtgccaggcaatatttggggaataagagggagacatggtcactgccttcatggagctcccgggctcatgagggaaacacaagctagacgatgacaagagtgacaatgaccccaccgaataacagctctgttgggggacgtccgaggtacgggggggcgcatcgaggcaggtgtgttcatcagcgtctactaggatttgcagggtgactgggaattagcatgagaaggaacgggaaggggatggcaggcacagagaacagcttgatcagaagcctggaggccggctgwgtaaggtcaggaaactgagaaaatcacgtgtggctaaagctgasagtgatgaaaagtaagctgggagagtgtggtggtgcctcgtcacccaggcactgagggtttggaggaactagagggtctgaagccgggaggggtggtgaggttttcagggagttttgtgttgcacgaagatgaattaaaggtcaagattgtgtttggtttgggtaaaattttatcaacatgtgccatacagaagaatgcacacccggctgggcgcgggggctcacgcctgtcatcccagcactttgggaggccaaggcgggcgggtcacctgaggtcaggagttccagaccagcctggccaacatggtgaaaccccgtctccactaaaaatataaaaattagccgggtgtggtggtgggcgcttgtaatcccagctacttaggagaggcaggagaatcgcttgaacccgggaggyggaggttacagtgagccaagaccgcagcattgcactccagcctgggcaacaagaatgaaactctgtctctccaaaaaaaaaaaaaaaaagaagagaaaaatgcacacctcataagcatgcagcgcagtraacatccgcagagtgaagcactgtgtaagcagcatgcagatcaagggcacgtgagctgcggcgcctaggccccctctaagccccgcactcccttccagacacatctgctgccaagagtaacccccagctgactttcatctccgtggattagcctcgcctggttttgcatttagtatcaacgaggcatacggtgtgtgccccgctacgtcgggctcctctctctccacataaggcctgtgaatttcatccatcctgttgccccaggcggtacttcttctggttgccagggttacattgtgtcgacagtactgatgattggcatttgggctgttttcttgggctgtgatgaatagcactgatgtgcacctccttttgatggatgaatgttcttttttttttttaatccctcagagttgatcccaaagaatgtactcatttttggggagggcatatgtgctcaggagtgggattgctgggtcagaagttatgcaattggttctgcattcagttttccatactgtttgtagggtgtgagcaggtttcagtcagcgttttctgtaactgtctcctgcctagttccctcccaccaatacccagcgaccccacgcctcagctccaggtcccaccgacattcacagyccctctctcagaagcctaaaggccagggtgcaggagagagtttggagcccgtgtcgcagagggctctgagtccaccaggggctgggggagggcccagcggggctccctgaacacctgctgaagcagagaggggctcccaggcttgaacacgctggggaggaggatgtggtgggaggcacttctgggttcctgctgcagagagtggggcctgagaccacgggcctgctgcatggggcaggaagtgcgctggctggccaactcgggcctagaaaaaggcaggggctgtgctcctgcttgagaatgacgtgtgcctctcactcacattgtctctcttaaaatgtaagagaccagggctggcagcatcatgggttttggttgccacagaaggtatgggtgggacagacagcagacatggaaatagaccctgagggctgggcatgggggctcacacccgtaatcccagcactttgggaggctgaggccggcagatcacttgaggtcaggagttcgagaccagcctggccaacatggkgaaamcccatctctactaaagataccaaaaaaaaaaaaatttagctgggcatggtggcaggtgcctgtaattccagctactcaggaggctgyggcaggagaatcacttgaacccaggaggcagaggttgcagtgagccaagatcatgccattgcactccagcctgggcgacagagtgagactccatctcaaaaaaaagaaaaaaaaaaaaaagaaagaaagaaakaaaccctgagaacaggacaggttagagctgggtgaaggcaagatgtgagcttcaagtcagtgaccagttaaaaagattgttaaacatttaaatacaaaatactaaataaggtcaggcatggtggctcgtgcctgtagtctcagcactttggaaggccaaggcaggcagatcacctgagctcaggagttcaagagcagcctggccaacatggtgaaaccccatctctaataaaaatacaaaaattaaccgggtgtggtggtggcacatgcctgtaatcccagctactcaggaggcagaggctaaggcaggagaatcacttgaaccagggaggcggaggttgcagtgagccgagatcacgccactgcactccagcctgggagacagagtgagactccatctcaaaaagcaaacaaacaacgaaaaacatactaaagcaataaataaaggcaggagayggacaagggttgctgggctgtacccagctcagggtgtaacagggcccctgtggctgcgagctgatggccagtcctctgtcagagctggtgggtcaatggtttgtcagccacgtggtcaacaaacctgcaaactcccggcagtgggggataaaaggtgtgggaagcagaggcagctcagagggccccaggccatgtcattgcatgatggcggcatgaatggcagtcttgggatctgcagtgcgcaccctgcacagctgttcatgatggcctcctgggaacgcgcagtccaggtgggaagaaagggtgggggtggggtgctatagtcagggctgctgcagggcctggaggggatcaggctgcacttcctttgggaaggcttcctgaggagctggggtttgggatgattgctctgcagcaggagggatctcaggcagaggaaacagtccgggcagaggactgaggaggagagagactggaggcgggtccaggcctgcacctaccccaccaaaacggggtctgcggtggagcccagttttgaccccacccttcctgggggagcagggaaggagatgctgggtctagggctgaggtcggggctggggagagaggcagggttgctaaggaagcaacctaatttgggggctcagctgcagagccggaacagaggagcagctctctgctgcacccagccctccgcccctcagccctgccccagatgagccccctcagctgttgcctgggctgttgttcaatagtcactcaacacttactgagcccttgttctgtgccaggcattgctccagaccctgggaataacacagtgaagaagatagacaagatccttcgggagcctactgtctcgtggggagacagataataggcactatcagatgatggcaggttctgagaaggaaatcaaacagggtgatgtgaagcagagtaactgggttgtgaggcacggctgggtagagaaagcatttatgaggaggtgacaggcgaggctggggaaggagaataagccaaccttggggagagtggaaggtgagggctctgggaataggaaacagcgcggtggagggaacagtgccgtggagggaacagcgccgtggagggcctgaggcaggaaatgctggcgctggtcacccaggaactggggctgccactgacagaagggacattggtgtaaactacatgagtgggccaggtgctgtggctcatgcctgaaactcactgtaactcactaggctcactcccagcagtttgggaggccaaggcaggaagattacctgagcccaggagttcgagactagcctgggcaacatggcaaaaccccatctctacaaaacataagaaaatttgccaggtgtgatggcacgcatctgtggtcccagttacttgggagactgaggtgggaggatcgcttgagcctgggaggtcaaggcygcagtgaaccgtgatcatgccactgtacttcaacttaggtgacagaaggagactctgtcttaaaaaaaaaattacatgagtaaattaaaaaccaaataagtgggccaggcacagtggctcacttctattaatatagaagttttcttgtagttttggaggccagaagtctgaaaaggtgtcagcagggctgggtcccttctagaagctctgggggagaatctgttttcttgccttatttggcttctagaagctgcctgcattccttggctcacggcctcctcctcctcaagcctgcagcatagtaagctttgcatctttctctgacactttggaagaccaaggygggagtgcttgagcccaggatcagcttgggcaacacagtgagacttcatctctatagacaaattaacaaaattagctgggcaaggtaactcgctcctgtaggcccagcaacttgtgaggctgaggtaggaggattgctgagccsgggaggtcaaggctgcagtgagctgtgatcacactactgcactccagcctggacaacagagcaagacactacctaaaaaacaaacaaaccccacaaaataacaggaggctattaccatcaacaaggcmggacgatgatggaaggagcatctggagaagagttgctttctagaaataatttggagagtcrggcacggtggctcatgcttgtaattccagcactttgggaggctgaggtgggtggatcacctgaggtcaggatatcaagaccagcctggccaacatggtgaaaccctgtctctactaaaaatacaaaaattggccgggtgtrgtggctcacacctgtaatcccagcaatttgggaggccgaagtgagtggatcacctgaggtcaggagttcaagaccagcctggccaacatggtgaaaaccccatctgtactaaaaatacgaaaattagctggtcatggtggcgggcgcctgtaatcgcagcactttgggaggccaaggcaggagaatcgcctgaacccaggaggtggaggttacagtgagccgagatcgtgccattgcactccagcctgggcgacaagagtgaaactccatctcaaaaaaagaaaaaaaaaaaaaagaatttggagagagaaccaacagggttggcaggtggattggatgtagggcatgagtgaaaacacgacgaagtgaggatgcctcctgggttttgccttgagaacttagtggttgctggtgccatttgctgtggcggggaagatgagaagaagcaggcttgacaggaaagaccacaggttctgtttgtttcctatcgacgctgtaacaagttaccacaaatgtagtggcttacaacaacacaggtttattattattattattattattattattattattttgcactctttcacccaggctggagtgcagtggtgmgatctcagctcactgcaacttccacctcccaggttcragtgattctcctgcctcagcctcccgagtagctgggattacaggctttcaccactatgcccagctaatgtttgtatttttagtagagacggggtttcaccctgttggccaggctggtcttgaactcctgacctcaggtgatcygcctgcctcggcctcccaaagtgctgggatgacaggtgtgagacactgagcccagctgcaagtttattatcttgtagttttggaggtcagaagtctgaaaagctatcagcagggctgggtcccttctagaagctctgggggagaatctgttttcttgcctttttaggcttctagaagctgcttgcattccttggctgacgggctcctcctcctccttaggcctgcagcatagcaagcttcacawctttctccgactctgattctcctgcctccctcctagaaggacttttgtgattacactggggctttacagcccagccaggacagccctgggggcttctgggatgggagaggcctccttgggaggctcccagcattccctgcagtctcgccacttctcccctctgcctgcctcaacgtccccctgagtccctgcggctcgcccatgccaccgttttcggggcctccctcatagaaggacccttgtgatttcactgagcccacctagataatccaggataacccccccatctcatgatccttaatttattaactcacatctacgaagtcccttttgccataaaaggcaacatattcacaggttctggggattaggacgtggccttctttggggggccattattctgcctacgatagcagatggagaggtrggaatttcagccgttataggtgtattgaagccatgggcttggaagggatcactagggagagtgtgccggcaaggaagacagtgacccagcccccagatcctggtggcagatagaggtcagaccgcgaaggcaccagcgaagccttgaggaatgaggagagagtaggcagaaatctagaaaaaagtgttcgaaggagatggttactcatgtttggggcttctgagaggttgaggaagatgaggacagagagcggtccgttggatgtggcattgtgggggcccctggtgaccttcacaggaactgactcagagggtgggaagtcagcttggggtgggttcagttgtgggtgggcggatggacgcacaggtgcagactttcttattattctgtaagccatgccgatacgtgaatatatttcataatgtattaaaatgtagagtgataggagttgaggaagtggagacggtatctcatttctgccccaccttcctgtgctctttagtctgtcccaacccactgtagccacatcatgacctttttttttttttttttttttttgaracagagtctcgctctgtcacccaggctggagttcagtggcgtgatctcggctcactgcaacmtctgcctcctgggttcacaccattctcctgcctcaggctcccgagtagctgggactacaggcaccygccaccacgccyggctwattttttgtatttttagtagagacgggvtttcaccatgttagccaggatggtctcgatctcctgacctcgtgatctgcctgcctcggcctcccaaagtgctgggattacaggcgtgagccaccgcgcccggcctcatcatgagcttttgaaagcacagctaatcatgtgcttcccctttataaagtcctccatgacttctactgccctctgcagaaagaccttggacttggttcactgttaaccaccaagcccctcgtcccctccccaccatcccctatgacaaccccyggagctcactgtctgtctcaggacagcccagttctcctgggtaacgtggatggtgagaatgttgaggctgtccctggaatctgccgtctccctggactgggcctgggtgggggcaagaagtttgcagtcaggaggcgcagctcttgaggctgccttaatcaggctgaggcagccacccccaaacctccagttcttttatttatttatttatttatgagacgaagtcacactctgtcccccaggctggagtgcagtggcgtgatctccrctcactgcaacctctgcctcccaggttcaagcaattctcctgcctcagcctcctgagtagctgggactacaggcacacgccaccatgcccggctaatttttgtatytttagtagacacggggtttcaccatattgatcaggctggtctcaaagtcctgaccccagatgatccacctgcctcagcctcccaaagtgctgggattacaggcgtgagccgccgcgcccggcctccaaacctccagttctgactgacccacaggataggggcaccagcgtactcttctcaggaactaaggccaggcagggcaggccccctgggtggcccacgaggaagccagcactgcccccaacagaaccaaccccaacgctggtggttttctggcctccccatccctgtccccataagagagcagagtttttattaaccatcagtatcaccccttctttgtcagggtgggcagcaggcagagaggggttgcatttaaccatttcctgcctggtgctgtgtagaagcagaggttgggcaaatgtcttccccataatccagagtctgggctaggaatctgccggccagacagggagcttgtgagtgcaggcaactggaatgggaagggtgctgggcaggcagggagaagacgaggaacatcagccagctcagctttgcaacctcccctcccactcaggctcctggtcaccagccccagaaccaagaggacaccagggcccctccatcgatgttcccttgtccaggatgaaatcctttgccatcctgtaggtaagtcagccccamctccagggaatgctccccaggaccccctttctagcaaaatccccctcatctaaactcaaaccattccaaccccagccctgcctcatccagcccgttcacccctagactccagcataacccacagcaagattccatcccaatgcccagtcccaccccaacccaatcctaatccccagccacctttcctgacacagtcctagcaacagaaatgatacctacagcgtattgcgtgcccaccctgtgcccggcagtcctctgagtcattctgttttcatcctcaaaaccrcgccatttataagagaggaagctacagttcagagaatgtaggtcttttggttgccagtatgacaaagttcacacttttagtgttggtggctgattcgaaactctagcccttcctgatgcaagtcatcacacctcagtgcaattcaccccctacatattcagtctaactgtggccaccctagtaactagcatggggcctgacatatattaggtactcaataaatgccatttgaatgaatgaatgaatgaatgaatgaatgaacctgattcactcattaaactctatccatcctacccagtcaaactcaggtcacagatttactgacaacctcttggctatatatatataaataaatagaatccttgtcttgtctgaggctgggcgccgtggctcacgcctgtaatcttagcacactgggaggccaaggcgggtagatcatttgaggtccagagttcgagaccagcctggccaatatgatgaaaccccatctctaccaaaaatacaaaaatcagccaggcgtggtggtgcatgcctacaatcccagctatttgggaggctgaggcagaagaatcgcttgaacccaggaggtggaggttacagtgagctgacattgcaccactggactccagcctgggcaacagagcaagactgtttaaaaaaaaaaaatcctgccaggcacggtggctcaygcctgtaatcccaacactttgggaggctgaggtgggccgatcatgggtcaggagatcgagaccatcctagctaacacggtgaaatcccgtctctactaaaaatacaaaaagaaattagccaggtgtggtgacgggcacacgtagtcccagctactcaggaggctgaggcaggagaatggcgtgaacctgggaggcggagcttgcagtgagccgagattgcgccactgcactccagcctgggcgacagagcaagactctgtctcaaaaaaaaaaaaaaaaaaaaaaaaaatccttgtctgagaggcactgagttgaacagactcaatctcagtccagcagggttgactgagtgattccatgactgaaaaataagacagtatcctgaggctgacagtggggaggacgaggaaggagctaccatttctgcccctgaggctgggggcagtaagattccccaggatgggtctgtgaggctggsgggttccttggtccacacagccagtcccacggtatcttgcacattccttggcacttacatacccaccaggcagtgcttctccacccacctgcccraccaaacccactgaggaaaagcagcaggcatccgctgttgctggacgcccatcaccacgctcacaaggctgggcacagagcagacgtcaatgggcacgtgttgaaagggtcagcaaatgagccccggggatgggcactcggccctgaacgtgtccagtcctgaccttgaaggcccccgctctagctttctagaggcttctctgagtggccaacagttcctcatgggggcctgaccaaggtggctctgtgccctctgaccttggcttcgggtctctgcctcccagagtcccctcctcctcctcacctgggcttaactttttcagagcatgtccccatccccaaggggaggcaccggggagtgaccgttgtccggagccaccacggtgttttggtgagtgcaggagcgagaggagggagggccttagggaggctggtgctasccctcgtggttgaccctggtgttgagaccagttctgactgccaygctgttcccgaggctgagtctagcgtctccctggtgccaaccccagggctgactgtagctctgaccaccctgataccagggctgacctaggtattccctgtgacccagcacactcctgcaggtgtcggcctcggccttgaygccaacactgactcctacacccggtgaggggtgggccagctcttcctgtgccccctgcctggttgagccactgagttctggaatgggggtgagaatgtggctgtggctcgggaatcgggaggtgacctggtgtttccccaccctctcttccctcccacagatatgcattcaagtgctggtccggcggcctcacagcctcagctcagaactcacaggcacctgtagcctcctgggccctgacctccgtccccaggctcaggccaacttcttcgaccttggtaaggattggacattcactggccttggatagctctaaagagatctccttggtctccaagaaaaggcaccagctcacggcagatgcagtgggacgcaggcccacagtggagcaaggcagggttgaggcatcacgtgaaaggaatcagggcagaaccatgtgtgagcgtgctcaggygaggatggagcctttctgactctgagctcttccatgtgtgtttttaaagaaaatctcctggatccagatgcacgtgtggacactggagactgctacagcaacaaagaaggcggtggagaagacgatgtgaacacagccaggcagcgccgggctctggagaaggaggaggaggaagacaaggaggaggaggaagacgaggaggaggaggaagctggtgagaagaggcagatctgggttgctctgagtcyatcagagccaattcctaggctggtggcctccaagggtgaggggtgcctcagtctgagagatggggagcagtggctggactttacagacctgacctgtaccagctccayccactctttcttataagtggggaaactgaggctcagagagtggtagtgatgggaatggctcacacagcacacaaagcctgaccaggttctagctctctttttgaagggggagacaaaagcttctctcttggggccaggtgaggtggctcatgcctgtaatcccagcattttgggaggctgargtgggcggatcacttgaggtcaggagttcaagaccagcctggccaacatggtgaaaccccaactctactagaaaattcaaaaattagccaggcatggtggtgtgcattatagtcccagctacttgggaggctaaggcaggaggattgcttgaacccgggaggcggaggctgcagtaagctgagatcccaccactgccctccagcctgggcaacagagtgaagctctgtctcaaaaaaaaaaaaaaaaaaaaaaaaaaagcttccctcttgggagcttctccaacttcttccctgaactgagctggttgtcagggctgcagtgggggtgcatgccctacacatgctacccttacatctgcctcacatcccatgcccactcctgacctgtttgtcttggccaggcaccgagattgccatcatcctggatggctcaggaagcattgatcccccagactttcagagagccaaagacttcatctccaacatgatgaggaacttctatgaaaagtgttttgaggtgggcttcyctaagagctggttaacacttatctattgctgagaatcaccctacctcagaacaacaatcaccacatttgctcacaattctatgggtcacatacttgggctgggctcagctggatgattcttctgtccrtcttgcctggagttaccctggagctgcaggcgtctggttgcttgactggggctggatggcctaagatgacctcacttacttgtctggaccatgtgtctttagcaggccagcccaactttttcgtggcagcaacattctaagagggccagatccaatgcatgcaagtatttttcaagtctctaattacatcacatttgctgatgtcttattggccaaagccagtcacatgaccaatcccatcgtcagtatggagggcactacacagggagctggggagaagtctgtgattcactgggggcctttactatcgcacccttctccacccctactcgcttagagattttgctctgccttagcatctctttctgcccagggataaggtagaaggagtggatttttctgctgcttccagcgggagacatttcaggggcagaggtggcaattcttccaacctcctgccctcctgcccatcccctgcagtgcaactttgccttggtgcagtatggaggagtgatccagactgagtttgaccttcgggacagccaggatgtgatggcctccctcgccagagtccagaacatcactcaagtggggagtgtcaccaagactgcctcagccatgcaacacgtcttgtgagtgtgggggctgcaggaattattctggccatgcccagagtctctgtggcatcactcatggaggaagtggctggccagaaccgcaggagaagagaattagggctccagcctttccctggccgagagagaacgtgagggatgacacctcaaggctgtcctccaaaaagtcttccaaagacttcctcttgtgagatgcaggagagcagagtgctcagtggacaggctggctgggttcaaatctcagctctggttttttttttttgtttttttttttgagatggagtcttgctctgtcaccsaggctggagtgcagkggcacgatctcagctcactgcaagctccgcctcccaggttcacaccattctcctgcctcagcctcccgagtagctgggactacaggcggccaccaccacgcccagttaattttttatatttctaatagaggtggggtttcaccatgttagccaggatggtctcgatctcctgacctcgtgatccgcccgcctcggcctcccaaagtgctgggattacaggcgtgagccaccgcgcccggcctcagctctggtttgtatctgtgtgaccccgggcaaactgaaggaccttgtgacctgtgcttcagtttcctcactttaaaaatgagaaaaataggctgagcgtggtagctcatgcttgtaatcccagcactttgggaggccaacacaggtggatcacctgaggtcaggagttcaagaccagcctggccaacatggtgaaaccccgtctctactcaaaatacaaagttagctgggtgtggtggcaggtgcctgtratcccagctactcgggaggctgaggcagggagaattgcttgaactcgggaggcrgaggttgcagtgagctgagatsgtgcyattgcactccagcctgggtgacagagcgagactccatctatctcaataataataataataaaaataaataaataaaatgagaataataatagtactcacagcttggagcagtggcttgtgcctatagttccagctactcaggaagctgaggcaggaggattgcttgagcccagaagttcaaggatgcagtgagccatgatcacaccactgcactccagcctgggtgacagagtgagacgccgtctctaaaaaagaaagaaaaataatagcacttgcctgatagattttgtgacggttggatggcttaaaatatacagtgtttacaacagtgcctggcacatgataagtgccatgtgagtattatctatcgttttaatatcatgagtcttcctgtacgcacacaagaggaatggactgccaggcagtaccttcctgctgggagcaggtgagaagcaagaacacctgtgttgcagccctccctctgcccagcctcgctgcgtgacttaagggggcatcacccccttctctgggtctttcgggaggattgtgaaccctcccaattctaatacaggtcagagaataaagtctctcctggagctcggtcatccttctggcaawgctctcttcttcatttactctcccctgcttagagacagcatcttcacctcaagccacggctccaggagaaaggcatccaaggtcatggtggtgctcaccgatggtggcatattcgaggaccccctcaaccttacgacagtcatcaactcccccaaaatgcagggtgttgagcgctttgccattggggtaagagccaggagccgggagacacctcctgaacctgcacagcctggggtggggagaagccagggttgtcgatgggggcttttctgtaagcagcttatccagaccctgttctatttgcaaatgctcctcttctctycatgctctgtcatcccagagagggctcatttccccatggtggtcacagcttactggccaaatagtggtgggagagccacaggaaacacaccaaggagggttcctggaggaccgyggtgccaagctgagtcctgccagacaaatgggagtagctggcctagggcacaggggaggcagagaggggccctgcaggcagagggaacagcatgtgcagaggtgaggaggagcttggtgtattcaggagaacaggtgtactttggtaaaactggaattttgcccagagtatgggtagaacagggagcagggaaaggaggagaaaggaaggaaggagacaggtaatggagggccccagaggccagatggaggggctcasctctctccctgggcctggggaatccacgcagcrctgactcgctgacccaggctgtctgtgcaggtgggagaagaatttaagagtgctaggactgcgagggaactgaacctgatcgcctcagacccggatgagacccatgctttcaaggtgaccaactacatggcgctggatgggctgctgagcaaactgcggtacaacatcatcagcatggaaggtgagggctccgggacccaggccaccgcaggaggcccgagcctatgctccagcccggcctctgtcccatcttcatgtggtttctctgagcaactcccatcatctccctgaacctcagctcttccatgtctaaaaaggcaatggccgggtgtggtggctcatgcctgttatcccaacactttgggagacagaggcaggtggattgcttgaggccaggagtttgagacccgcctgggcaacatggcaaaaccccatctctactaaaacaaaaagtagctggggccaggtgtggtggctcacgcccataatcccaacactctgggaggccaaggccggtggatcacctgaggtctggagttcaagaccagcctggccaacatggtgaaatcctgtttctactaaaaatacaaaaaaatgtagccaggcgtggtggtgcatgcctgtgatcccagctactcaggagcccgagacagaagaatcactcgaacccaggaggcagaggttgcagtgagccaagatcgcgccactgcactccaggatgggtgacagagcgaggctccatctcaaaaaaaaaaaaaaaaaaattagccaggcgtggtggcgcatgacctctattcccagctacttgggaagctaaggcaccaggtcacttgaccttgggaggcacaagttgcagtgagctgatattgagccatggcactccagcctgagcaacagagtgagacactgtctcaaaaaaaaaaaaaaaaaaaaaaaaargscaacaatatccccaggcctccttgcgtcccagaatctccatgaagctctgatgaactgagctggtgctggagaaacaaggatggctggggcatagtcccttctcccaggagctcacagacgaggaaactgaggcctagaaagagtgaactgcccagatagtagttgctcaaggagaacctgggtctctaccctcagccgggttctcttcctgttacaccaagcatggttccttctgggagtgaggccaagctggactgtcccctgactcagtttctcccttcacctcggcccacagcagtctcactgggcttcttggcttgcaggcacggttggagacgcccttcactaccagctggcacagattggcttcagtgctcagatcctggatgaggtacgtggctgactcagcaccaggcaggcttgcccattggtgaggggcccaggacacctaggattcagggactcctgcctcccatccagggctctgccctacctgtggtgattcctgtaaaagagcgattttattttaattaattaattwatttatttattttgagacggagtcttgctctgtcgcccagtctggagtgcagcggtgcartctckgctcactgcaacaaaagggtggccatattgatgacaggaggtcgcttttttctgtgtgctcaaacatccagttgttcccctgaatacagaccaggcaacaggactcggcctgggtcagcttatcaaccaagctgcttgcttctcccggaggagggagtgcaagggcacgaggcaggagcccagtgttggccatctcaccttcccgcctgcatctctggccaggcgggcactagaccaccgaacgcccccctgctcccagccaggttagccgcgctggcccggagacccgcggccaccgtggcccggccttgggtccctcccactcatctgggccccatccccgtccccttcagcggcaggtgctgctcggcgccgtcggggcctttgactggtccggaggggcgttgctctacgacacacgcagccgccggggccgcttcctgaaccagacagcggcggcggcggcagacgcggaggctgcgcagtacagctacctgggtgagggcggggccacctgatgagggcggggccacctgatgagggcggggcctggaggctccctgatgagggcggggcctggaggctccctgggcgagggtggggcctgagggctacgtgggcgagggcggggcctacctgggcgagggtggggcctgggggctacctgggtgagggcggggcctggaggctacctgggcgagggtggggcctgggggctacctgggtgagggcggggcatggaggccacgtgggcgagggtggggcctgggggctacctgggagagggcggggcctggaagttacgtgaggagggtggggcctggagaccacctgggtgagggcggggcctagaggccacctgggcgagggcggggccgagatggggacaccgaggctgcgcattaggctgcacttgaggtttccggatgggggcgggacctggtcagtcacatgggccgaggggcgggtcctggttagggaccstgaggctgagtactacagcctcctgggtaggtacaaggcctgtcaggtacaccaggcacagcagccacccaggggagggcggggcctctccattaataatagtggtgcagtagctcacgcctgtaatcccaggaggccgatgcgggcggatcatctgaggtctggagaccagcccggccaacatggcaaaaccctgtctctactaaaaatacaaaaattagctaggcgtggtggcggatgcctgtagtcccacgtactcggaaggctgaggcacaagaatcgcttgaacccgggagggggaggttgcaatgagccaagactgtgccactgcactccagcgtgggcgacagactgagactctgtctcaaaaataaataaataaataaataaaaataataatagtggtgggcgtcctctcacccctcttctccgtcctcctagggtgtgtgtgggagcgtgggtagtgaatgtgtgcgaacgagtatttcgagcaaagctgcatacgtgacagacagcgtgtgcatcatatctgtgtgatggggatgtgtgtgactggcaaagtgagagtgctcgctgatgccgatttttaacatagtgagaaagacagtctctcctattttgccccccwccccaggccactttgaaggcctgactgggaaggtgccggggccaagagagaggccaggtgggagcacacggtgtgttcacagccacaccacccttgccccaggttacgctgtggccgtgctgcacaagacctgcagcctctcctacrtcgcgggggctccacrgtacaaacatcatggggccgtgtttgagctccagaaggagggcagagagkccagcttcctgccagtgctggagggagagcaggtacctgctggggaaagcctccaccccttatgaccgatggggaatctggaggcccccaagggaaaggagtgggtcccacggtgcacagtgggccagggcccgggctgggtgaaactcaggctcctgagtggagctcgagggctctgcttcagctctgcatgtctgattgctaggcagtttcctccgctgtggggcctgggctgctcctccactcttctgttactctcagtgagcaaattgatatgtaacgacccaaaytgggtggtccaggaagcacgcgggcaggggtgtagccttgctgaggggtgcaggagcggggctcctggtgagctgagttcctcccgggctgtagatggggtcctattttggctctgagctgtgccctgtggacattgacatggatggaagcacggacttcttgctggtggctgctccattttaccacgttcatggagaagaaggcagagtctacgtgtaccgtctcagcgagcaggtgggagagtctccatcttcatgagcttgctgaggctgtggcactcagcctgacacagaggtgatggaggctgggagtgccctggccctgcctggcaccagtgggcagtgatggggaggtgctcaggctggatggcggctgggcggggcagcggcatcgctctccgcacccactttcttacccaagggtgatcgttgatgataatatctctaatatcyctttttttgtggttgttgtttttgagatggagttttgctctcgttgcccaggctgcaatgcaatggcaggatcttggctcaccgcaacctctgcctccggggttcaagcaattctcctgcctcagcctaccsagtagctgggattacaggcatgggccacacacccggctaattttrtatttttggtagagacagggtttctccatgttggtcaggctggtcttgaactcccgacctcaggtgatccacccacctcggcctcccaaagygttgggattacaggcgtaagccacctcgcccagcatttttttttttttttccgagactgagtctcactctgttgtccaggctggagtgcaatggtgcaatctcaacttactgcaacctctacctcctgggttgattctcctgcctcagcctcccaagtagctgggattacaggcatgtgccactacacccggctaatttttgtaattttagtagagatggggttccgccatgttaaccaggctggtctcgaactcctgacctcaggtgatccacctaccttggcctcccaaagtgatgagattatgggcgtgagtcaccgcgcccagctgataacatctcttacagctgcatggttggcaaagcccgtttagtccaggatctcacttgtttctcatagtaactatgggaggtagctgccactctcatcttacgggtgaggaagctggggctcggcgagcctcagtgatgccgagacttgctcaagtgtacctggcatgtgtgtggcagagccacgagtgaaacccaggcctcccatttgcagcaatgcacccctgcccatggaactagaggggggcgggctctgactcctgaacttccaggtaggaggaccccagctttcccctggtgctcactgtatggccttgggaagktccctggccagtgagcgtgcatcctgggtggcaacggagtgggcacccaccagcccagcgagcgtgcatcctgggtggcaacggagtgggcacccaccggcccagtgagcgtgcatcctgggtggcaatggagtgggaacccaccggcccagcgagcgtgcatcctgggtggcaatggagtgggcacccaccggcccagtgagcgtgcatcggggtggcaatggagtgggcacctagcaccccttcttgagggctgagctgtttgtttgctttacaggatggttctttctccttggcacgcatactgagtgggcaccccgggttcaccaatgcccgctttggctttgccatggcggctatgggggatctcagtcaggataagctcacagatgtggccatcggggcccccctggaaggttttggggcagatgatggtgccagcttcggcagtgtgtatatctacaayggacactgggacggcctctccgccagcccctcgcaggtgacccatgggrccctctccttcctctcctctggggctctgacctctctcagatatgatgacccaagccccaagtcggcttcagtcctaagtgctgggcaggtctcgggggttgggaatgcccagtgaaagaaagaagtcccccaggctagggggagcttccagaccagggcctcacctcagccccttcaggttgggrggaggttccagaccagggcttcacctcggccccttcaggttcrggggaggttgtggcggtacctgtctccttccctggcctataccccctccttccacccacctgcctcgggtccctgcttcctctctttctgtccctcgctcctgtctcccacccagcacctccgcgccttatctctcattccccagggctcccttgccagcctctcacactgcatgtattaacaggcacttccacccacctccagctcctcatgagcacctccacctggatggcccccaggcatctcactcccacacggcccatctgagagcacctgcttcccctagaactgatgctcctctgagacctcatccccctccacaccccacaccggaaacctcagacagtcctcagcacgctcacagcctgcacagcctgtcagttcccacgtcctcatgattctagctgtctcccaactccagccccttctctctatccccacccctgcggtcccagctcaggccttgccatcccactcccagcccacccagcttcctcctcctctccatcttccaccccatgtcttcagtgccatttctaaagtgttatcctgattatgtcacttcaaaacaacagaacctttgttgacaccccccatccccaagccccacatcaagcctccttgtaccccaatcccctgtggtccaccccgtccctggccctggctgcttctcagaaggccctgctctttccccaygcctcactctttcccttactctcccctgtcaagtcccacctgccctwcgaggctccatccaaatgccacttcctctgggaaagcttgctccctctttcctggttctagactcggggctccctggggctggatggtgcctgcgatgctgatcgggatagatcatgaaaggactccccgccccgtttccctcccttccctcgccccacgccttgtgtttctgcctccacagcggatcagagcctccacggtggccccaggactccagtacttcggcatgtccatggctggtggctttgatattagtggcgacggccttgccgacatcaccgtgggcactctgggccaggcggttgtgttccggtagggttctgtcctgctttctggggtcccaggcccagcctcacccatttgccctgctctaaatagctccatgcagacattaggcactgagggagggagccagcaccgtggttgtgggcacaggctctggagtctgcccgtctgggtttgaacctcagctctcagccctctcagcctttgggcaggttatttaactctaagaccttacctaggaattataagagcacctacctcccagagctatgaggatcatgcaagcgaatatatacaaagtatttagcacagtgctcagcgatggctgtgattgcagagttttttgttttttgttttttttctgaggcrgagtcttcctcttttgcccaggctggagtgcagtggtgtaatcttggttcactgcaacctcygcctcccaggttcaagcaattcttctgcctcagcctcctgaggagctgggattacaggtgtctgccaccacgcccggctaatttttgtatttttagtagagacagggtttcaccatgttggccaggctggtcttgaactcctgacctcgtgatccacccatcttggcytcccaaagtgctgggattacaggcatgagccactatgcctggccaagaattgcagagtttttgtgccccatccctcagtgaatgatcaagtcccgtggctgtaaatgagctcatggagcgcccgtctgtcccgtcctctccaagctgcagacttgctgtctacccagcacctccctgagctgctgctcacagtcatcccgaagtgaacacgtctaaaaacagagcttttgctgggcgcagtggctcacacctgtaatcccagcactttgggaggcccaggcgggtggatcacaaggtcaggagatggagaccatcctggctaacacggtgaaacctcatctctactaaaaatacaaaaaattagccgggcatggtggcgggcgcctatagtcccagcgactcgggaggctgaggcaggagaatggtgaacccgggaggcggagcttgcagtgagcggagatcgcgccactgcactccagyctgggygacagagcgagactccgtctccaaaaaaaaaraaagaaaaacagagcttttatctccccccacccttcattcccccaaatctatcctgccctcaggctttctgtctcagcaaatggcatcatcatccacccagcaattcaggatgaaaacgtaggcgtcatctttgatgcctcttttccttcctctccaccacatcaacaagtcttagttggctctgcctccagaccagtgcaggcactgtcttcactycctggacactgctgccacagcctttcctgcttccagcccctgcgctccattctccacacagcagcagccctatcccttcactctgctgcctgaaactcctccacggctcctatttagagtaaaatcccaattcctcaccatggctttacagggctcttcgtggcctggcccttcccgcccctccattcccatctcctcctcccatcctctgtctcactaattagattccaggcatgctgacctttgtgctcctcaaacaaaccaaaagtgttcctgccacaggcccttggcactggctgtgctttcttcctggagtgctcttccccagatcctcacacagctggctctttcttgttaacaaatctcaaccgaaatgcctcctcatcagccacgccatctgtgaccacccagtctcagtagccctcggtccttattaccgtatttttgttgttgttgttgagatggagtcttgctctgtcacccaggctggagtgccrtggcaggatgtcggctcactgcaacctccgcctcccaggtttaagcaattctcctgcctcagcctcccaagtargtgggattacaggcgcccgccaccacacccagctaatttttgagttttttagtagagacgatgtttcaccaagttggccaggctggtctcgaacccctgacctcaggtgatcctcccgcctcggcctcccaagtgctgggattacaggcgtgagccaccgcactcggccaacagtattttaatttttctcatagccttgccaatacatagtatctccctgtttctctcgtttatttgcttgttgtctgctttcccaccaaagcagaaacttgtctctttccccactgtaccctgagactcagggatcacctggatgtgggcatgtttgatagagaaccattgaatgcatgaaccaatcagccaggccctgacccagaggctgagcagtcacttctcccatcctctttgctgtcttgtttagctcccggcctgtggttcgcctgaaggtctccatggccttcacccccagcgcactgcccatcggcttcaacggcgtcgtgaatgtccgtttatgttttgaaatcagctctgtaaccacagcctctgagtcaggtaaaaaaatggtccagctgacccctgcctggtgtgatggtctttcctttttggcttctgtaaggggcagggaaagaggactggggcggggggtgggtgggtgttggtctgaggtcctggtgcttgaaatccctcgattagagcttagctccttagtctccaggtttgttaaatgcaaactgcctcaagaaagggtggtctgaggttatgtccacactcagaaggggtttagagctgacactgttgggaagagggacactggggcccttcctcagggttgaagggttgagtttctgaaaaaaaagactcagaaggccgggcgcggtggctcacgcctgtaatcccagcactttgggaggccaaggcgggcagatcacgcggtcaggagatcgagaccatcctgcctaacatggtgaaacaccgtctctactaaaaatacaaaaaattagccgggcaggtgcctgtaatcccagctactcgggaggctgaggcaggagaatagcatgaacccaggagacggagcttgcagtgagctgagatcgcaccactgcactccacgctgggygacagagcgagactccgtctcagaaaaaaaaaaaagactcagaaaaaggcagccatttctccatgcccacgtgtgtgcgtgtgtgcgggggcttctgagacacaccctcctctttctctctgacttgtgtcttctccccttccctcctcactatgtgcctccggcccaggtgggattggatcacctgttggaggcctggtttctctttccttacctgaaactcattaggagactgttcccagaaaggaggtggtgggcatggctttcacagcccaggtatttactgctcatccaagagctcccccctggaacgattcctcagcaacagtccccgaggtttaatctctcaggagcaatctctgagatggtctctgcctcccacagtcagagagcagtctcctggggtggggtggctttcccaaagcagcaggctattatccacctggggattgaaaatgacagacctggccgggtgtggtagctcacgcctgtaatcccagcactttgggaggccgaggtgggcagatcacgaggtcaggagatcgagaccatcctggctaacacggtgaaaccccgtctctactaaaaatacaaaaatyagccaggtgtggtgacagatgcctgtagtcccagcactttgggaggccgaggcgggtggatcacaaggtcaggagatcgagaccatcctggctaacatggtgaaacgccgtctccactaaacaaaatacaaaaaattagccaggtgtggtggcgggcgcctgtagtcccagctacgggggaggctgaggcaggagaatggtgtgaacccrggaggcggagcttgcagtgagccaagatcgcgccgctgcactccagcctgggtgacagcgagactctgtctcaaaggaaaaaaaaaaagaaaaaagaaaaaaaaaagaaaataacagacctgtcccttccaggacacagagctcgatgggctgtgcgatgctgggcaagtgtctctccctagctgagctggttctgttctgtacagtaagagaggcggccccgggatctccacggtgcttccagctgtgccgtcctggggtttttctcckcagagtccctctttccctctccattctctttgttgtctctcttcctccttattttcttcttcaatctcgatccccttcccragccctccttccctaaagaaggctgactcagtcctgggaatgtgctgctccgggtttggggcgggagcactcagagaccctggtcaggtgtcagaagacggtgagaaaaatatctttgaaaaaccgacgcaggagtccagccgcagggaagtacctgcatggggacactgttcaggaggggccacaaggaacctcaggcaggctgggggccttctgtctgcggctggctcatccccacctcatcgggaaggtctggtcttcattcccaggcctccgygaggcacttctcaacttcacgctggatgtggatgtggggaagcagaggagacggctgcagtgttcagacgtaagaagctgtctgggctgcctgagggagtggagcagcggatcccagctttgtgaggacctcctgctcatgcccacagagggagaggtaagtgacggagtttggatgggagtcaggaggggtctttgtcattgagaaaggatttgaggtgatgcagtgaagggcacatacccagacctacaaatgaggtgattaaaataatcataacaggccaggcacggtggctcacgcctgtcatcccagcactttgggaggccaaggcggggggatcacttgaggtcaggagttcgagaccagccgggccaacacggtgaaaccctgtctccactaaaaacacaaaaattagccgggcgtggtggcgggtrcctgtaatcccagctactcgggaggctgaggcaggagaatcgctggaatccaggggagggaggttgcagtgagccgaaatcatgccactgtactccagcctggccaacaagagcaagactccatctcaaaataataataataataaatcaagaaccacgtaatggcacggaagatggagatgctgtcattgctgacgtttttcttggtaataactcaggaatgccagtgttcttggcatgcgttatcmgacctcacctgataataactaggaccgagggcctgaatgtcagttggcatcaaaaaagtgaacaactaaaaggaagaataaaaagatagaaacgaccatctagaaaggtttactcctggcaaaggtgcccagagacatggggtaaaaaaagtatgtcgggactcaaaccctgacaggatctcgaactttggatctatatggatcgtttattccaataaacaaatgcatgaattcttcttctgaatacacatttacccccaaagtgattgttaattggattaaagtctacagccttccttaaataaaggcttaatcacattctctaccagagaatcatgctcactttctcccatgggcttgaggctcttataggggcagaaaggcttatttaaacaaagagagtggcaaatggtatgctaagcaatctccttatcttctctcttacctctctaatatgtcctccatgttgctttgagaaagatcttggttggttgggcgcagtggctcacgcctctaatcccagcactttgggaggccgaggtgggaggatcacctgaagtcaggagttcgagaccggcctgaccaatgtggtaaaaccctgtctctactaaaaaaaaatacaaaaattagccaggcgtggtggcatgcacctgtagtcccagctacttgggagactgaggcaggagaaccttgaacctaagaggcagaggttgcagagagccaagatcgagccactgcactccagcctgggcgacagarcgagactccatctcaaaaaaaaaaaaaaaaaagagagagaaagaacttgataaacccaggtgtggctgtgactcttcccttctgtctgagccagttctttacccctttgtgactgggataagaaccatagcagctatagacacaaaaccgtagtagaatgaaggagatttttcccaaagcacttggcagcttgcttgaaggacgtgtcccttcagcctggcttatttggaagatgcttaggacttctgactcaccacttttattgtttatttcttcttatgatgacatcaaagtagaaagtattcttgcaaggtgcrgtggctcatatttggaaatcccagcactttgggaggccaaggtgggtgaattgcttgagcccaggtggttgaggctgcagtgagccatcatggtgctgctgccctccagactgggtgacagagtgagtgagaccttatcttaaaaaaaaaaaaaaagaaaagaggccgggcgcggtggcttacgcctataatcccagcattttgggaggctgaggcgggtggatcacttgaggtcaggagttcgagaccagcctgaccaacatggcgaaaccctgtctctactaaaaatacaaaaattagccaggcgtggtagcacacacctgtcatcccagctactcgggcggctgaggtaggagaatcgcttgaacccgggaggcggaggttgcagtgagccgagatcacrccactgcactccagcctgggcaacagagcaagactycawctcaaaaaaaaaaaaaaagaaaaaaagaaaaagaaaaaaaaagcattattgttgtcatcttctcccccacatccaactctaaccctgccttccgtggtgaccccacagctctgtgaggaggactgcttctccaatgccagtgtcaaagtcagctaccagctccagacccctgagggacagacggaccatccccagcccatcctggaccgctacactgagccctttgccatcttccaggtgactctacccacagccagtacccagccctcttaagagcctatcccacagaaaccacctgctcccctaacttccaagaatggtggagttgggaggcaatgtcttcagacggcatttgggcccctcaccgtactcatggtgaaactgagtccctgagatggtgttaatgtgtccccgtgagtgaggactcatgggtaacgcaggtctccatctgcccctggggcttgttcctttatgtctttatgttcacaaaagcacttgctacatctttcatgaggcacatgcatacattgcatcctggggacctcacttggcaagcggctctgatgacgctgtgatgggggttccttgtgggagctagactggagctgtcgtgtcttgcactgcagagaggatgccctttggcacacctgcctgttcatgccctgccagggccttcaggctgaatggccccaccaaacctgtatcctagcctctcctcctggtgcccatcagtgcagcttagacaggcgggtagtgtcataagaaacttttgtcagccgggcgccctggctgatgcctgtaatcccaacactttgggaggttgaggcaggtggatcacctgaggtcaggagttcgataccagcctggccaagatggtgaaaccctgtctctactaaaaatacaaaaattggccgggtgtggtggcatgggcctgtagtcccagctactagggaggctgaggcaggagaatcatttgaatcctttgcccaggaggcagaggttccagtgagccaaggccgtgccattgcactccagcctaggcaacagagcgagactccatctcaaaaaaataaaaaataaaataaattttaaaaaatacaaagattagcccagtgtggtggtgcatgcctgtagttccagctactcaggaggctgaggcaggagaattgcttgaccccgggagacagtggttgcagtgaaccgagatcgtgccactgcactccagcctgagtgacagagaaagactccgtctcaaaaaaaaaaaaaaaaaccacaaaccttcaatatatatttcctaaaaacaaaggcattgtcttaacatagtacaataatcaaaatcaggaaattcacattgataaaatactattatctaatttacaaactttattcaaattttgccagttgtcctattaatgtcctttatagcaaaagaaaaaaaaggttctggtccaggatcattcatagcgttctacagttatttatcyttagtctcctttaatctggaagggtttctcactcagtcttyccttgtcttttaatgacattaacatttttgaagggtacaggccagtccttttgtagaatgttcctcaatttgtctgatatttcttcataattagattcaggttatacatttttgttttgtttttgagacagagtttcgcccttgttgcccaggctggagtrcaatggcgtgatctcggctcactgcaacctctgcctcccaagttcaagcaattctcctgcctcagcctcccgagyagctgggattacaggcatgtatcaccatgcycggctaatttttgtacttttagtagagacggggtttcactatgttggccaggctggtcttgaacacctgacctcaggtgatctaccctcctcggcctcccaaagtgctgggattacagacgtgagccaccatgcctggccaggttatgcatttttgtcaggaatatcacagaagtaaagtgtgtccttctcagtacaccatctcaggaggcacctaatgtggacttgtccattcctagtgctgtttgcctgtgtcattaataagcacgtctcattttatggtgagatgccttgcgattgtatcctgcttaacatctctttatgtgtctttccttaaccagtgatgactattatgctatggcaaagagatttttaaaaagttattccccgtataaaatgggtgaggaaaaaaccacgtggtattaggcacatcggtgttaccagagagtgcgttctggctgggagtttagatggcttaaccccattctctttcactggggctgggtggaagagatcaggctatgtggctatattaaaaatacaacaaaaggccgggcgcgggggctcacgcctgtaatcccagcactttgggaggccsaggctggcrgatcatgaggtcaggagatcgagaccatcctggctaacacagtgaaaccccgtctctactaaaaatacaaaaaaaaaaaaraaattagctgggcgtggtggcgggcagctgtagtcccagctactcgggagkctgaggcaggagaatggcgtgaacccgggaggcggagcttgcagtgagcggagattgcrccactgcactccagcctgggcgacagagcgagactccgtctcaaaaaaaaaaaaaaaaaaaaaaaatacaacaaaaaaccctgcatgaaactgttgacccacttagagagagcgccacgctttgacttctgcaaatggcatcccccttccgcaggaagtagaaagttccctttcaagccctgggctgtcattccccctctaggccrtgggaacagacctgcagacagctgccgaggtggccaccgggagagaagtgcgaagtgcagaggctctccagccgaggagctggctgccttccttcataatacaaaaacagacccagctactttagaacactggaatttttaaaaacacgaactggagcttttcaacctccatggggccttttgaaatgtggctttcagaattagtcgattatgtgtaggcaagggaaatagttagcttacagagacgactagccaggccgggcgcrgtggctcacacctrtaatcccaacactttggaaggccaaggtgggtggatgacctgaggtcaggagtttgagaccarcctggtcaacatggcgaaaccctttctctaataaaaatacaaagttagccaggcgtggtggcacatgcctgtaatcccagctacttgggaggctgaggcaggagaatcgcttgaatcckggaggcagagatggcagtgagccgagatcgcgccattgcactccagcctggatgacagagcgagactccatctgaaaacaaacaaacaaacaaccraaaaaacagatgactagccatgaggaaggaacctccaaggcctggaccttgacgatatttggctaggcatcccccactcctgcccgggctgttctgcctatatccgaaaggactaaggaagcttctcttygcgtaggtgtctgctccctgaatgctcaaagtcgtgagctgtgtgttgctgctgaattcgcatgatgtaaatgtcatgggcacccctaacattccgtgaaggtcaccccagtttttaccttggtcaaaggactgggtcacagtgtgcccatgttataggacagatccaggaatgtcacccaggaatgtcacagtccctgctcttcggggacaatcccagcctgcacccctcacctccctgtaactgcacttctcagggtgagcaggaggcacagcccaaaacttcctataaggagaagagccggaggcagggctgctggggaaggcggagcctgggctgatcgggactctctgtctggttacagctgccctatgagaaggcctgcaagaataagctgttttgtgtcgcagaattacagttggccaccrccgtctctcagtgagttggacatagccgtcagtttcctcgattaaccttctcccgaacgcttgcctgggcaattccttcattaggacaccctgcacatccccttcccctctccccgtggcccacaaatggcttctgcacttattatctcaatatgtcctcagctaccccagaagggaggcaagacagagatctgtcttcccactttctagattaggaagcagactcagtcgccgagggccctgcataggccatttggtggacttgaacctgggtctcttgacatcccggacaatgctatattcagaacccagcgttcttcacagccaggctgacctctacctcagttagaggtaacctctttcccggcccacctcttggccaaattaactaatcaatcaaatatttctggaccatctactttgtgccaagcactctaggtgctggggatacttctgtgaacaacacagacaaaaatccctgccctcctggtgctcttagggggagaagatggtaagtaggtaaattccatgttgatgagatgaacgttgaagacacagggaaggtgggaaggagtgttgggtggcagctgatgctgaagttttcaatggggtggtcacggagggtgacactttggcacacactggaggaggtaggggaacgagctatgtggwtgggtgtctaagggaagagcagctgcaggtaccctgggttggaagcctgcctggtgggtggggggcagggtgagragctagtggctgcagtggagtggggcggggtgtaatgagggaaggggaggaagggggaagaggccatggggcttcttaagccctcagaagggcttttgctgtgagctgggaagtcagaggagtgacacactcatgcagcttagcaggatccttcttgctgcttagctgagaagagaagcggcacttgctccctttgtaaccactcaggtgagaggcggtgtgggctgggccatgacgggagtaacagtttaaagtgacagctcatacgtagcacgtgctgacagaatggaggcggagggaggaaagagggccacagccccagcatgcggcactgcactgtccaacacaccagccacgcttagctgtttacatgtacatgagttaaaattaatcacaatgaaacattttgttcctcagtcacattagccacacttcaaagactcagtggccgcctgtggctggtggtgttgggcagcgcagataccgcctgtctccatcgctgcagacgttctattggaccacactgaattccagaatgacagtgttgccaagcacatgagtgtgggtttagacatgtagtggtcttagaatgccccccaggccgggcgcggtggctcatgcctgtaatcccagcactttgggaggcagaggtaggcggatcatgaggtcaggagtttgagasaagcctggtcaacatggtaaaacyccgtctctactaaaaawacaaaaattagctgggcatggtggtgggcgcctgtaatcacagctactgggcaggctgaggcaggagaatcgctcaaactcgggaggcggagggtgcagtgagccgagatcgctccactgcactccagcctgggtgacagagcaagactccaaaaacggggagggggggagggtaacaaaacaaaacaaacaagcgtccttggcgactagtgttgtgtatgtattgtgattctgttggccagctggctggagttgccgtatatggggaagaacgcagttccccaagtcctggtcagccctttcatagacatttgcaggaccarttgaagactttcaaatgctctggaatccaggctaacaagcaggcacagctgtttccagcagggaattaattacagccaagaaccaacctcccagccagctactgggggtagtagagatacagcacgcatggcttgccctacatcgccccctagtgtacatagcaagcaaacgcttctctttcaaaaacgctagtgagcctggtcgtcggtgtccagctgtctcagtggtttttgacctgaggacatagatccccaaaagaatctaatgaagactacagacccctctccttagaagatcacatgtgcatacataaattttggcattccgggccctctgagacggtccctaggcctcagattaggcaacgctgttaatattctgatgacactgaggtctcacgcctgagctctaagatgtgtgtccagctgacatgtyagcatctctgctttgttatcctatatgcacctcttgtcatgtccccgattgaacgcatcttcttccacccttgggtcttcctcccatgttacctccctcagtcaatggcaccactcagccaccggcaccactcagccaccggcaccactcagccacctgagctagaaactcagaacttgcccttaactcctctgtcccccctcccctgcctctttttcgtttcatttgctttactgtctctgacttctttccttctccactactgttgtcttttttcttcttcttcttcttttgagacagggtctcactctgtcacccaggcaggagtgcagtggcgcgatcttggctcactgcaacctccgcctcccggcttcaagtgcttctcctgcctcagcctcctgtgtagctgggatcacaggcgcacgtgaccacactcagctaatttttgtatttttagtagagacggggttttaccatgttggccaggctggtcttgaactcttggcctcaagtgatccacctgcctcacctcccaaagtgctgggattacaggcgtgagccaccgtgtccagccatccactactgtttccttatttcaggcatgtatcatctctcgggtggagacagcaggctctgtctctgcttcctgtctctccctccagtcaatccagcctcttctcagctgggataaaaaccaaaccaaaaccaaacaatgggaacaaaacacacctcacattacttcctaggccgggcgtggtggctcacgcctgtaatcccagcactttgggaggccatacttcctagatctgcacatctcatctttggacatttcagatggaaaacagttttctcggtattgctaatatgtttttctgtcdatctcagctactgagagtggttctgcactctgggtccctgtgatacctcagcattctggaggaccctttcacacatccccaggaccctcttttccaggacatgtggacccatgtcttaaaccacagccttttaatgggaagggtctgaatgattttgtgggtaggaagctgaggccaagaaacggggtaggacagtatgtcttatgcacactgttctccagtgcacagcagtgccccataaatattgtggcatggatgaatttgtgtcatagagtacctcacctagggtcacagtgaattggtggtagaaagaggatttgggtacaattctctcaattctttggactactagactccaggcatttaattagccttttatttatttatttatttattttgagacrgagtttcrctcttgttgcccaggctggagtgcaatagtgtgctcatggctcactgcaacctctgcctcccgggytcaagcaattctcctgcctcagcctcctgaatagctgggattacaagtgcctgcaccacacctggctaattttttttttctttttttgagatggagtctcatgctgtcacccaggctggagtatagtggcgtgatctcagccctctgcaaactccccctaccgggttcaagcaattctctgtctcagcctcccgagtagctgggrttacaggcacctgccaccacacccggctactttttgtatttttagtagagacggggtttcaccatcttggccaggctggtcttgaactcctgacctcaggtgatctacccgcctcggcctcccaaagtgttgggatgacaggtaattagcctgtcttggcttctgtttcctcttctataaaatggagagtagctgtactatttcacagggttactatgagggttgagcgtgtgagacgcagtccttggcacatggtaagcactaaataaagggcagctattatcgtcatctcatgcaacaactgagatgggcgtggcagtccagctgtttgcttatgttgagaggaagaatgtctaagctaaacgtattccttaggcaacttatctaagaagttacttaagaaggtgctattctgggctgtgtgcggtggcttacacctgtaatcccagcactgtgggaggccaaggcaggtggatcacttgagcccaggagttcaagacccgcctccacatggcgagaccctgtctctacaaaaaatacaaaaattagctgcacattggccaggctgggtggctcacgcctgtaatcccagcactttgggaggccgaggcaggcggatcacctgaggtcaggagttcgagaccagcctgaccaacgtggagaaaccccgtccctaataaaaatacaaaattagccaggcatggtggcgygtgcctgtaatcccagctactcaggaggctgagacgggagaattgcttgaacctgggaggtggaggttgcagtgagccgagatcgtgccattgcactccagcctgrgcaacaagaacgaaactccgtctcaaaaaaataaaaataagaaaaatattagctgggcatggtggtaaacacctgtagtcccagctactcggsaggctgaggtgggaggatcacttgaacccaggaagtggaggctgcggtgagccgtgatcattgcaycacagcaccacgctctagcctcggtgaatgtcctattgtattgcgttgaggtttttacagatgaaataaactgtaacatttttatctgtaccctgtgcaggcaggagttggtggtgggtctcacaaaggagctgaccctgaacattaacctaactaactccggggaagattcctacatgacaagcatggccttgaattaccccagaaacctgcagttgaagaggatgcaaaaggtgactgtgacggtggctgtggaaacaggtccctcacgcccctccctcgctgcatgcctgcttttctgtggtgrccccctcactggcacccctgcctccagcctcctcctggtccaaccaacagatggttaataactagataaatccccgccagtccrgctccatgcctcccgaggcaccatattctgctgcagtrccaccctccctatgtgcggccctttcttcaccagggttctgagagagaagtgagtctaatgccctaagacactgagaaagtaaaaattagcttagactgggaaagtgaaaatctgccctgccattcccaaggctggatacagacacagatactaggaaacagtctgtttcccgaggacaccctgtggctgacaagtatcactgcactgagaaattttattctctaaaatcacagatsagaaaactttgggccgggaacggtggctcacacctgtaatcccagcactttgggaggccgagacgggcggatcacgaggtcaggagatcgagaccatcctggctaacacggtgaaaccccgtctctactaaaaatacaaaaaaaattagctgggcgcgatggcgggtgcctgtagtcccagctactcgggaggctgaggcaggagaatggcgtgaacccgggargcggagcttgcagtgagccgagattgcgccactacactccagcctgggccacagagcaagagtctgtctcaaaagaaaaaacaagaaagaaaactttgctgtttgaagtagttacgtcrgtaattatgaacccctatccctcttgcctggagagtgtaagtcattttgaccaagagaagagtctgtttccacctgaggtagagagcttcagatacagtgtctgtcaactttctactccatattaatggtttcccaggaagcgggccctgggtctgattcacaggctggcctgctggtgactgactccttgacactcagccctgctttaccatcaaaacaggactttatttacatttcatctgaactccacccttccctggagtcctttaataaccgccttttccattgttcagtgatacacacaatagtgtagtttttggatgggtgcagtggcccawgcctgtaatcccagcactttgggaggccgaggcgggcggatcacctgaggtcaggagttcgagaccagcctggccaacatggcaaaaccccgtctctactaaaaatacaaaaattagccaggtgtggtgatgtacacctgtaatcccagckactcgggaggctgaggcacgagaatcacttgaacccggaggtggagattggagtgagctgagattgcgccactgcactccagcctgggcaacagagcaggactctgtctcaaaaacaaacaaacaaacaaacaaaaccaaagtgtagttttcctcattgcagtgagtcaataaatttgaatttgttggactgtagatttgtccccggtcatcttaggctatttgggctaggacagtatccattatatgaatgaagcaatctcctaggcygggcaccgtggctcacggctgtamtcccatcactttgggaggctgaagtgggtggatcacttgaggtcaggagttcgagaccagcctggctaacatggtgaaaccctgtttctattaaaaatacaaaaaattagccgggcgtggtgktgggcacctataatcccagctacttgggagactgaggcaggagaattgcttgaacccgggaggtggaggttgcagtgagccgagatcgcgccacttcactgcagcttgggcgaaagagtgaaactccatctcaaaaaaatgaaaacaaaagcaaaaaacaatctcctaggcatctagaggggaactagggatggaccgtccctgggagaattaagaaaactcactgcagtcatcacctgcccctcgggggtccaggtggggagccctggtggctacgtggcagtgctggtgtgtgccggccttccagccaggctgtgggttatatttgcatcagtccatggcccagctcaaatgcctccttccccaggaagaccttacgaattcctccgagttggaattcatatttctccactgctgttctctgcagctccctcacagaagcaccccttcgaccttgtatttaaattcctcggggatctactgctgaccctgcctgtccggcttgtgaggaagacagggaccaagtggactttatttctttagctcctggcagggtgtctgacaggcagaaaaattagtgaatgtttgctgaattgctgtgaggaaaccacgtttttgttttgttttgtttggctctttaagagaatgtcatctgctctkttaacagcctccctctccaaacattcastgtgatgaccctcagccggttgcttctgtcctgatcatgaactgcaggattggtcaccccgtcctcaagaggtcatctgtgagtcggtttggacygattcgctcttctcaccaccctgcagttggcgtcttctgcaycttggtctcayctcaatctctcggttccagctttgcgcttcgcttgactgcagtgtgtccccagcagtgcttacagtggctaagctggctctgaaagtagggggtgatggggaygagagctttccagtacacagccctaggtgaactgcctgctcacctccrtgaagcagagtgaagttgtgggtagtatggagggcgtgtcagacaaaaagtttttttgtttgtttgtttttgagatggagtttcattctgtcacccaggctggagtgcagtggcacartctcagctcactrcaacctcygcctcccgggttcaagtgattctccttcctcagcctcctgagtagctgggattacaggcgtgcagcactacacccggctaatttttaaaatatttttggtagagatggggtttcaccatgttggccaggctggtctcaaactcctgtcctcaagtgatccacctgcctcgacctcccaaagtgctgggatgacaggcatgagccaccatgcccggccaagacgaaaagttattaaccctgatctgtcccttgtcatctctgtgctgtgggaaatctctgaagtggcttcttcacctgtaaaaggggaatgaggccgcctgccttgcttactccatatttgtatttgaggcttaamtgaaataacggggccrggcgcggtggctcatgcctgtaatcccagcactttgggagaccgaggtgggtggatcatttgaggtcaggagttcgagaccagcctggccaacatggtgaaaccccgtctctactaagaatacaaaaattagctgggcgtggtggtgcgtgcctgtaatcccagctacttgggaggctgaggcaggagaattgcttgaacctgggaggcagaggttgcagtgagctgagatcacaccattgcactccatcctgggtgacagagcgagactccctctcaaaaaaaaaaaaaaaaaaaaaaaaggaagggaaaggaaacatgctgtgttagaaaaatgtgaggaatgtgaaaatctgaggaatcgtctcctaggtctgttccacgagtagctagcggtctgaattgtgagtggcatagagagaatcaactgaccatttttccccctttaaaataggctcatgtttcagtcgtttggcagctagaggagaatgcctttccaaacaggacagcagacatcactgtgactgtcaccaagtaagtactgcctgggtcacagcagagtcaggctatgaccccggaagacatctccctgccacatgcacgctgtgagaggaacggcccccttacagcccagggagaaaggaaaccccagtgagcccacagaaggcatctgtttccctgcagggactcgactttctcttcttgttaccagagataatgaaaatgttcttttgttcacacacaaagtaaaactgtggtacagcctggtggaatgagccctggagttctggttctcgttcactcagctttggaatagcttgggatagctatgttayctgcaagacctctgtgttggggggtaaggtggggaacgctgctgggaagagttctcaaagggaggtgattctgcccaccagaggctgtgcctgttttgattgccatgacttggggaggggggtgttcagtaggacatctggtgggtagaggccaggaatactgccaaacatcacgcagagcagtacaggacagcccccacaaccaagaactaactggcccaaaacgtcaatagtgtggaggctgagaagcccttttaaaatcagtattcttctaagtgtggtcttctagagacaattctgaactccaattgcttatctctgaaagccttttatttatttatttattttttgagacgagtctcgctctgtcgcccaggctggagtgctgtggcgtgatctcggctcactgcaacctctgcctccaggttcaagcarttctctgcctcagcctcccgagtagctgggattacaggcgcccgccaccacgcccagctaatttttgtagttttagtagagatggggtttcaccatcttggccaagctggtcttgaactcctgacctcgtgatccaccagccttggcctcccaaagcactgggattacaggcatgagccaccgcgcccagcctctgagagccttttcttatctgactcccagtgaccctggggagccaggtgcagaagcacctgttctgcagtgagagcacatggacacagggaggggaacagcacacactggggcctgtgggaggggcagggttggggagagcttcaggaagaatagctaatgcgtgttgggcttagtaactaggtgctgggttgacagctgcagcaaagcaccatggcacacgttcacctatgtaacaaacctgcacatctgcacatgtaccctggaacttaaaaaaatagccaggcgcagtggctcaygcctgtaatcccagcactttgggaggccaaggcaggcagatcacttgaggtcaggagttcgagaccagcctggccaacatggtgaaaccccatctctactaaaaatacaaaaattaactgggtatggtggctcacgcctgtaattccagctactcaggaggctgaggcatgagaattgcttgaacccggggggcggaggttgcagtgagctgagacrgcaacactgcactcctgcctgggcaacagagcgaagccctttttaagaagcacttgctatgtacaaagcaggtgtgctatgaactaacactcttattcctagttccaatgaaagayggtctttggccaacgagacccacacccttcaattcaggcatggcttcgttgcagttctgtccaagtgagtactcccaagaggccagcagcggtgtgactccatcgcccagggggcagctttgggctctctctcgtagatggagctggtggtcaggatgaatgtggacactgtccttctgagaggagcctgcttagaacccaggctctgatattgatctctagggtgctaacatttgggtcacaraaaccccactgtggtcatcaaaggaggtgtattgccaactagtcgtgctacaaaagggaattaatatgacgctgtggagggaagaaggcagctgtgggactgggaagtaaggaggggatgagtaaggccatttgagggataattagaaaatgaaccagcccaacgatacagaattcaaatattccacctcaccccaactgcgctacgaccactttatattttgacattcagcttttattccttttttttttttttttaaactgagacgaagtctcactctgtcgcccaggctggagtgcagtggtgccatctcggctcactgcaacctctgccgcccaggttcaagcgattctcctgcctcagcctcccragtagttgagactacaggtggacaccaccaggcccagctaatttttaaaaaatttttaatagagacrgggatttcaccatgttggccaggctggtcttgaactcctggcctcrggtgatccgcctgcctcggcctcccaaagtgctgggatgataggcatgaaccactgcacccggcctcattcctggtaaaggtctggtgccctctgtcctaatgtattcagttgaaagcagtcgagttcattcaaaaagagaaggccrggtgcggtggctcacgcctgtcatcccagcactttgggaggcygaggtgggtggatcacctgaggtcaggagttcaagaccagcctggctaacatggcgaaaccccgtctctactraaaatatgaaaattagccaggtgtggtggcaggcgcctgtaatctcagctacttgggggcttaggcaggagaatcacttaaacccaggaggcagaggttgcagtgagctgagatcgcaccactgcactccagcctgggcaacagagcaagactccasctcaaaaaaaaaaaaaaaaaaaaagggatgagtgtagtggctcatgcctgtcatcccaacactttcgcaggctgaggtggaggatcacttgagcctgggaggttgaggctacactgagccatgattgttccactgtgctctagcctgggcaacagagtgagaccctgtctccaaaaaagggagaaagactcctcaagggctgacgcatgtcctstcaattgcagaccatccataatgtacgtgaacacaggccaggggctttctcaccacaaagaattcctcttccatgtaagtacttattwttgtaaagctgtagatggcaaagcaataccagctttgatttcctactctgattttaatttgcaggtacatggggagaacctctttggagcagaataccagttgcaaatttgcgtcccaaccaaattacgaggtctccaggttgyagcagtgaagaagctgacgaggactcaggtatttaaaggcagttmtttatcagtcacacctctttccacagtgactacagagtctcaagtataaaaaccagagttctagaaacagagtgaagrcaagttaaccatgggaaaagattaggagtaaattcccgaagtcctgttcagaaggactctcaatcactcagctcttaaagcaacctgtcagttttcctccctttgaggaaaaataagcaaaaattggccaggtgcggtggctcacacctgtaatcccagcactttgggaggccgaggcgggtggatcacaaggtcagcagatcgagaccatcctggctaacacggtgaaaccccgtctctactraaaatacaaaaaattctccgggcgtggtggcgggcrcctgtagtcccagctacttgggaggctgaggcaggagaatggtgtgagcccgggaggcggagcttgcagtgagccgagatcctgccactgcactccagcctgggagacagagtgmgactccatctcaaaaaaaaaaaaaagcaaaaattaaaaccttgtcagtagacagagacattttccctttgaaaattgataaattctgcttctctgtgtgagygatgtaacatgtgacatttcttacactgccccctataagttgcttactagcttcccttcttctcccctgaractcttttttggtctctgctttgcctcagcctctttgctttcagttgtctcatctgtagtctggttcccaaagctagccttgatacctgaagcaacaggctctgctcagtatgaagctgaagcctgggcattttttttttgctcagactacataagtgttaaggctcaaaaaacggaaaggaatttacagaaaggactctgctgacaattagaaagagggcttataggtcaggtgccatggctcactcctgtaatcacccagcactttgggatgccgaggtgggtggatcacaaggtgaggagttcgagaccagcctggccaacatggtgaaacccccatctctactaaaaaaatacaaacaattagccgggcatggtggtgtatgcctgcaatcccagctactcgggaggctgaggtaggagaattgcttgaacccgggaggcggaggttgcagtgagctgagatcgcaccactgcactctagcctgggtgacagagcaagactctgtctcaataaaattwaaaaaaaaaaaaagagggtttataaatataaacgtttgttttcacatgtagtttatttatttaaaaaaatagagacaggggtcttgctatgttgaccaggctagatatgaactcttgggctcaagcgatcctcctgcctcagcctcccgagtagctgggaytacaggcgcacgccactgygcccggctagtttacttctttcagaacatttgttatcagcaaatttaaacatttcaacaaatatttcagtttccatttggaaacaaaattcttgtttgaaaagctgactggaaacctgtgagaatgggagttccaccctcctgtggggayggaggttgaaacagcaccagaggcttcaagaccagtctcctctcatttcggggcagtaagatacatttagcttacttaaacagactgtgctggcagagcaagtcagtggcagagctgaagttcagcattgtcctgtggaactcctggatttttctcttaatttgcttcatggcaggagtgttacatttagtcttgaaggtcatttgtttcagcatcttgtctgtcaggtaatgtaaccagagcacattactataagggtgatattcaccccagcggttgttattctccttcttcatgagcctgtagatgtcaaactggtagtcaccgtcaccggtaaacaggtcctcatccatggaaacgtcacagaaaaccacaatcccatcccgttccaagcgcgacagggtgtagtcaatgatgctcacttgcaacccacagctggggatagtgctgctcttcccattgagggtgtagtggagttttttgaggctggttttctttaagagcacgttcccccagtgtaagtctcggtgctcaaagcgcagtgatgcctctgccactgcgagggaggctgtgagctggtgtagaatgctctttgcagtagccaaggaagacaacttggttcgcatttgctctaagtcaatccctccaaactcaaattccagcacaatgaagagctggtcgtctttaaaaaaatcaggccggtcatttgcagagcctttggttgaattatagtgatcccaggctttgaggagcaagggagggtaagatccctggacacagtgcactgagttcagcccgataaagccttctgtgcggttgcacacttcaccggataagaggctcaactctttggagatgatgatctctggcaggatttcctcaaaggttttctgatgggatccattgactaaatctggtccttcaatagcaatgatttttatggctacgggtgtgtgatcagcaattgtttgaaacacttcgccaaacaccccttccccaatcttctcacagmgttgcagtttttctgtgggaaggcaatggctaaaggggacaggacccttctgactgcattccccataaaccttttcagcatcagatgcctttttgtttgaaatacttagagtgtttaaggggcttagcaaatacatagaggaggagtgccaagaggacggagcaccacttgttctgttcatgacaggccggtytgaacattctgatargagggatccagagagagaagtggcagtggtatagatgctgcagacctctgacacatcagtcacaattttcttcttgtggaaactgaaggaagccctggttttggtccaaaagcagrcattctgtaaaggagtcaggtcctgggtggggaacgaatcttttcccagcttttggccctttttaaagcggtgggaatggaggagagaggtttccgttgcctcctgatgtttgctcttccggcttgatctagttctctccagcctgtctrttccccttggcacaatgcggcccttgggaacactggcctcctgatgctctctccggacggcctcttgaagccctctctcttgacaagagtcctggcctgtggccctcctcttgcctgtgcttgacagacctggaccctctggtccatttcccaccaccagtttccttttacagcaggactctctcatattcttcccatctgcccgaaactcagaatcctcaggggttcctgagttcataaggccaaagagaactgacctgaggctggcgcgggtttggtggaccatcctggtgtccttggctcctcctgtcgcttcctcctgggagcaggggagagatgctcggtccagggagacttctgggaggtggaggycgctcgggacggctgaggctgcaaccagacaggcggaggtgccgatcgagatgacactgtcccttggcgttggggacccggggcagggcgaggccagagagctgaacagggaggcactgatgcccagctcgtcgccgtccctgggctggccgcacacgctgaggtccgggctgaggcggccggagtcgcggctggggaagggcggaagtcggagcgggccrcagggtgtgctgcacttctgcgggggccgagctcgcagccccaggcgtcttggggtcacggttaggcttgggcgagctcgcagcttccagcgctttggggtcacggtcaggctgggccggtccttgggcactcggccgccgggacacctccgccgccgcctcwccgggctgccggggaagtcggggtcgtcgggatcgtcaggatcgtcggactgcgaggggtcgccgatgctggcgtcgctgctgccgctgctgttgaagaaacgcctccggtcctgcggcgggaaccactgcgcggcttcccggcccggccgccgctgtctcctgccgtccgcagccccatatgtgcggaaaagccggctcccaggtcccgggagcgaagccgccatggccggcacccgccaagaggttcaaacgcaaacatcgcgagacttccgtgcgacgcggacgcgcccgcctgccgcggggtcctagctcccggccctgcgcatgcgcacctcgccagggccggggccgggacgggacggaaaactggcggcttggtttgttcagcgcgtcgcggtcatggctctcgtttcaggcctccacggtgtgcacctggagtcaggagcgcgcttgtgcgtacagttcggttcaggtaagcgcggccgtcccgagaggccaggggagggcggagggcctgaagcgggtaacgagaggccaggagactgtttttcctgggttacccctgcckgccagtgccgggggctgccaggccctccctagcttcgtccctgggtctcaattgctcccgctggagcttygcttgggccgaggtgagcgctgaaattgctcacaccctctattctgggaccttacgatgctctgtgtccgaagtgttaaaaagatttcagactttccgcacggaaaggaattgtgttcactagacctcgcttttccagcatgtggaagaakggcattcagtgagctgtgtcatcgcttcagataaagaaaatgtcaccgtggctgcagagatctcctgggatcactctgaggaggtgtttgagactgaaatgctccagatttgattatccagttgctcacgggcatcgcccctagaagagataatagcatctttgcataacrtgtccatgtccawaatagrtcttttggtgcaaaaaaccaaccctctgtcccaacccgttccttagctaccctcaggagggagatatactccagttacagtacaaggaactcgagggattacctgtgactcctctttcctacatccccacgtctattccagcagcaagccctgccatttcagggccaaaatatatcctaaacccattcacttctctccatttccactgccgttgtaattcaagctaccctttcttgccagggctgttgcaataascttcggcctgcctttcttgcctctgcttttcccacattctttacaaataattcccacgtaacagctatccgtcttctaagagcagacattagattgtgccaytcccctgcttattaaaaataacaaacaaacaaaactgatgcttgagcacacttagactaaaatccatacttttttcatggccagagcaaggcagtacttgatctggtctctgcttaattcttcaacttcatctcctagtactcgcctttctctcccactgccccttttataatcgggttattctgtcctattcttctagctcgccagtacagcattattctggccacaagactttgtacttgctgttcctttgcttgacactgctcttcctctaggtcctgacgtaggtggtttcttcttaaatttagctcaggtgttcttttcttttytttttttttttttttagatggagtcttgctctgtcacccksgctggagtgcagtggcacgatctctactcactgcaacctccgcctcccgggttcaagtgattctcctgcctcagcctcccgagtagctgggattacaggcgcyggcgaccacgcccagctaatttttgtatttttagtagagagggggtttcaccatgttggccargctggtctcgaactcctgacctcaggtgatcgcccgcctcagcctcccaaagtgctgggattacaggcgtgagccaccgcacccgacctaggtgttcttttcttttcttttctttctttcaagacggagtttcrctcttgttgtgcaatggcacgatctcggctcactgcaacctccgcctcccgggttcaagcgattctcctgcctcagcctcccaagtagctgggattacaggtatgcgccaccatacccggctaattttgtatttttagtagagatggggtttctccatgttggtgaggctggtcttgaactcctgacctcaggtgatccgccctcctyggcctcccaaagtgctgggattacaggcgtgagccaccacgcccggctaattttgtatttttagtagagatggggtttcatcgtgttggtcaggctggtcttgaactcctgacctcagatgatctacccacctcagcctcccgaagtgctgggattacaggcatgagccaccacacccggccacacgtgttattttcttagagaggccttccctgatcacttattctaaagtgggaactagtgatcaagtgatcaagtttaatgttttacagtgatccaggtgacatttgtgaggtctcaactgaagaagtagcaatgggggtggaaaagaaagggacagatacargaaataatttaaaaaaaaagaattgtgagtgtggtggctcacatctgtcatcccaacactttgggaggctgaggcgggaggattgcttgaggccaggagttcaagatcagcctgggcagcatagtgaaaccccatttcttaaaaataaataaatacataaattagccacgcatggtggctcatgcctgtagtcccagctacttgggaggctgaggcaggagtatcgtttgagcccaggaatttgaagcttcagtgagctatgattgagccactccattccggcccgggtaacagagtgagaccttgtctcaaaaaaaaaaaaaaaaaaaaaaaaaaaggaaaaatctcttacgttaaataaaatgaataagctgggtgtggtggctcatgcctgtaatctcagcactgtgggaggctaaggtgggtggattrcttgagcccaggagtttgagascagcctgggcaacatggtaaaaccccatctctacaaaaaatacaaaaattagcccagtgtggtggggtgcacctgtggtctcagctactcaggagactgaggtggraggatcacttgagcctggaaggttgaggctatagtgacccatgatcatgccattgcactccagcatgggtgacagagcgagatcctgtctcaaaaataagtcagtcagtcaagaactgactttggatggcacaagggaaaagaagttgaagaaaaggccaggcgcggcagctcrcgcctgtaatcccagcactttgggaggccgaggtgggtagatcatctgaggtcaggagttcgaracaagcctggccaacatggcaaaaccccatctctactaaaaatacaaaaattagcctggcatggtggcacatgcccataattccagctactcgggaggctaaggcaggagaatcgcttgaacctgacggggtggaggttgcagtgagccgagatcgcaccacttcactccagcctgggcgaaaragcgaaactccatctcaaaaaaaaaaaaaaggaagttgaagaataactgcagatgtcttgtttgggtaactttatgtagtgttgtgtacgttagggccattamctaagcccaggaatacctttaaagggaaaggtggtgaaggctgttcaaacacagtgagttcatgtctaaaatatgttttgtttccctcattcctttccccatcttctagttactaaaagatgtaactgaactgcagatccttggtgaaatatctttcaacaaatctctatatgagggactkaatgcagagaaccacagaactaaggtaattcctggctggcttctgagtastgcccaaggaaaattgtgcctaacctttgagcacctccacagacattctgttgccctcttcctgttttcagccttaacacttctgatcttggctctgccatcgctgcctttgtgacctttgagtgagtcagcttcttatgaaataaggcaattaagaggcctaagctgaggagttctgagttgaaataactaggctggaatctgcagtatatactttgatttgaaaatggattgattaaaaaaaaaaatttcgcagctgggcgcaggtggctcacgcctgtaatcctagcactttgggaggccgagacaggtggatcacctgaggtcagragttcaacacaagcctggccaacatggagaaaccctgtctaccaaaaatacaaaaattagccggacatgatggtgggtgcctgtaatcccacctacytgggaggctgaggcacgagaatcgcttgaatctgggaggcagaggttgcagtgagccgagatcacaccactccactccagcctcagtgatagagygagactcagtctcaaaaaataaataaataaawaaaaaatgarttacctaagtgagaaattgttttttgtatccagtaactgtcttagtgtgctgtatcagtgtttagttatagtattaaacagtactcaggaatgcataaatcttttataagatttagactagatactggaactcttggaattctttttgcaaaagtatgactagaagtcagactgatgcctgtgatttgtggactgaatgctttgtgtgttaccstgtgttttcattcttgttgacccttgcctggacatggcttcagaggtgatctatctgtgagctctgagctctttagttaggcatgattctctactagagggaatgtcaggagagtgatgctggattgctaaatataaggtcctctgttttcctccctggaggrggagaaaggagcaattctctagacatgccaatataacatttccttttatttttaagtagtgtatttctttttcttttcttttctttcttttttttttttttttttgaggaagaatctcactstgtcvcccaggctggagtccgttggtgccatctcggctcactgcaacctccacctccccagttcaagtgattcttcttcctcagcctcccgagtagctgggattacaggtgcccaccaccatgcctggctaatttatttattttttttaaatagagacaggatttcaccatgttggccaggctggtctcgaacttctgacctcaggtgatctgcccgccttgacctcccaaagtgctgggattacaggcatgagccaccatgtccggctaagtagtgtatttctaatacagaaaatagarggaaatggaaaatacagaaaacggaagaaayagaagtgccccattattgcactgcccagattttaacaaataaaartaatagcaagaaaatccaagccatacagagaatggtaccaaatgaaaaataatkgttccttcatttctcccttcccatgcccccagcagggaggagttactattaagtttcttatgtgcacattttaaatttgtatgtttccccctcttacttactgatacttttatytctatagcatggattccccaaaattcctttctttaaatccaatatcctaagyaaagtgttaagtagttcctgacaataagcccctgacttacagtgactctatgagtataaacaaactgtatccaaatgcatttcagccacaagaaagggaaaatccagctcatgcagcataagggcatatgctgtttatccagtgagggaggccggcctggggcgatggcctggcttctttggtccttgtactctgccgtgtgggggacgcattccttcatggccagcacaaagttgccacatctccaaatgctrtaytttcacatggcaggatacaaaacaggaagcaagaagtcagtagcaaaaggatgttggatttttcttcatgtgccttcccttttcagggatgaaacagtttccaaaagctcccaggagacatcctcttacatcttattagtgagatctgaatctcatgtcagtcactggcaaaggagaatagctgtgtcatgatcacctgagaccaacgatgattcctgaataaaatccraaaggagagaggggcccctgggcaggccagcatccgtgtttgctgcaaacagtagtacccggtgccttgcttctcccttaacctctacytgggcatctttggggcacttttgggaatctgtgggtttagaagaagataaagggaggtggctttgagaaatagggacatttcttctactcamatctggcctgtttccysagtcaccttgggacttcctttcacttcccaaacccagggtcttgagtccccctccttctcctgtagaatattccagccctctttctgttcttcctccctctttgttgctatggtacctccctattctcaaagcctaggacttcactcctatttagttcagctacctatgagctaaataggactggaaggtcaactttaggtcaaccagcatttataacttaattggaagaggccttaaaggtaagtttgtccagcccttcaccccgtacagaaacctctccaaagcacccctgaccttggtgcttaaacatacacgtgaagggttgctctgggcaggcagagaagtcttgttggctctctggccccacctaagtcctgggaacttcctctggccacaacttggaagggccatacctgggtctcaggaagsacatctcctgaactttctagctgagccctgccagaagagagattagactcccgaaattgggagagcctttggaaaacaaaacctgmggatgacttctaatagctgagctctgcaagtagtacacatggatataatttgcatttattatgtcccttaggtaatacacactttttagtctggtgaggggaagaccagtacttttgtcatattttatgtggggaaagtgtattaccaaagcctttagggatctgtgcaagatcaaaaagagccgtcagaacggagttggaaaggacttggagatcatttaaaggaagtcatcattttaaagagcataggcacggggctcagggacatagagcagtgtagcggcgtgacagcctcacagtcctgtgttgagaccggattccgtgggaccctctttcaagctgtcagarcatctttaacagaaggtcataatctcctgacagacctagcccttctagataaggggccagaatagtttcttacgaagtatttgggtgattggatagttttagatgatctaaaatgctgcatcagggaatatctagctttttgctttactgtcatcagctttgatcaatacacgggttgttgccaagtcctcgtattttgctccttaaaataacatgtaggattttttcctygtttgcttcacctgatttattgggcgatctctttgtcttgtctagatcactgtcgtcttcctgaaagatgagaagtaccattctttgcctatcatcattaaaggcagcgttggtggacttctggtgttgatcgtgattctggtcatcctgttcaaggtcagttctactcatggcatcacagtgagggaagactgggctctagttttgggcacagaactccttaggacagccaacctctgacttagagcagctgccctggcctcgtggccacttttttctcctccttcaactgcacacccccatttagacaaatgagtaaaacagtatctgtctgaaaagagaaaactctgagtwataaagagtgattttatatatatttctttggtacctccctrttctcaaggcccagaacttaatactgttatgttcggttacctgtgagttcaatagggcctggaaggtcaaccctaggccagcatttataacttacttggaagaggccttaacrgtaaggccttaaaacagatgtgactgttgttcccctgttgaaatcttttccttgccttcccgtcttaatgtgcaaactcttctactgctatttaagatcctctcctctgtccgctacccgtctctgcccttaagtgttgcttttttttctttttttttttgagacggagttccgctctttcgcccaggcttgagtgcggtggtgcgatctcggctcactgcaacctccccgtccccccgccctgaccccgggttcaagagattctcctgcctcagcctcctgagtagctgggattacaggaatgtgccaccatgcctggctaattgttttgtatttttagtagagacggggtttcaccatattggccaggctggtctcaaactcctgaccttgtgatcctcccgcctcrgcctcccaaagttctgggattacagkcatgaaccaccactcccagcctcttttttwaaaataaacaccagggtctttgtcccccaagctggagytcagtggcacagttaagggctcactgcagcctcstactcctaggctcaggtgatcctcccatcttagtctcctgagtractgggactgttactcaggtgcatgccaccacacccagctaattttttaattttaattttgtggagatgaggtctccctatattgcccaggctggtctcaaactccggggctcgagcsatcttctcatcttggcctcccgaagtggtggggttacaggcataagcacctgaccttgcttttttctcccaacaagtcaaactattccctaaataggttcgtgcctctgcmtacgcgtaggctgcttttcttgtcaggaatgccctccatgactgctcacttcactcactgtcttccctgaaagcrgtctagagactcctgagtcctctgtgctggcttctgtgtgtttgctgtgagctcccttctagaaacccttccaaatggcagtcatcacactgtrttgtaattatctctttttcctactagatgatgagcttgatgtaggaagctgtacttgatctccttctgtcttcagcatcataggctatactgagtatttttgcataaataagatkagatccagtacagccgaaattatcatgctttgcaaaataagttaawaaggttcarctgctcgggagagcagggttcagaggaaggtggagtcagttctgattgagggatgagcaccagaggtcttgaaggattggactctccaggagagattcagagtaagttaggagaagggagtagtaagtatgagaagcagaggaatataggggctatttaggcaacagccagaatgccrgttttctgaaacagatggctatctttggcctgtaactggacttttccttcctttgtttcagtgtggcttttttaaaagaaaatatcaacaactgaacttggagagcatcaggaaggcccagctgaaatcagagaatctgctcgaagaagagaattaggacctgctatccactgggagaggctatcagccagtcctgggacttggagacccagcatcctttgcattactttttccttcaggatgatctagagcagcatggagctgttggtagaatattagtttttaaccatacattgtcccaaaagtgtctgtgcattgtgcaaaaagtaaacttaggaaacatttggtattaaataaatttacacttttctttgcartagtgcctttaatctggaaatacagtattacttaggatttgcagtacattttgcctgatagggcaagttttcattcttatttttaaaaaatgatagattgtggctgggcatgatggctcacgcctgtaatcccagcactttgagaggctgaggcaggcagatcacgaggtcaagagatcgagaccatcctggccaacatggtgaaaccccatctctactaaaaatacaaaaattagctgggcatggtggcgggcgcctgtagtcccagctactcaggaggctgaggcaggagaatcatttgaacctgggaggcggaggttgcagtgagccgagatcgtgccactgcactccagcctagcaacagagtgagactccatctcaaaaagaaaaaaacaaaataggcggggtgcggtggctcacgcctgtaatcccagcactctgagaggctgaggcaggtggatcacgaggtcaggagatggagaccatcctggctaacacggtgaaaccccgtctctactaaaaataaaaaaaattagccgggtgcggtggcaggtgcctgtagtcccagctactcgggaggctgaggcaggagaatggcgtgaacctgggaggcagagcttgcagtgagccaagatcacgccattgcactccagcctgggcaaaagagcaagactgtctcaaaaaaaaaattatcgattgtatcctttcagataattcttaagtatcaatttttcagatttccagaagaaactctttggggttttaatttaaacatacaggttaagtttgggagcattgatatctttatagatttcctttctactccgcttgctgcgatttattttttattttttattttactttatttttttttttttgagacagagttttgctcttacttcccagactggtgtgcaatggtgtgatcttggctcaccgcaacctccgcctcccaggttcaagcgattctcctgcctcagcctcctgagtaactgggattacaggcatgcgccaccacgcccagataattttgtatttttagtagagatggggtttctccatgttggtcaggctggtctcaaactcttgacttcaggtgatccacctgcctcagcctcccaaagtgctgggattacaggcgtgagccaccgcgcctggcaatgctgagatttttaaaaacactctgtagcaaggttttataattttcttcaaaggggtcttaatttataaagacttacttccagctgcatttttatttgtttatttattttgggggggtctcactgtgtcgcccaggctggagggcagtgatgcggtcataggttgctgcagccttgaacttttgggttcaagccgtcctctgcctcagcctcctgtgtagctgggactacaggtgcaagccactatgcccggctcattttttaatttttcttttgtagagatgggatctagctatgttgaccaagctgatttcaaactcctggcttcaagtgatcctcctgccttagcctctgaaagtgttggggcgtgagccactgcgcctgacctgttattatgcttttgttgctactgtgtgaaaataccgttttttccccctgactgtttagagtttgcacttagaacagttggtggttttgaatgtttatcttmtctggccattttactgaactgtggttttgtttttttggagacggagtctcactctgtcgcccacgctggagtgcagtggtgtgatctctgctcactgcaacctccgcctcccgggttccagcaattctcctgcctcaccctcccgagtagctgggactacagggacccaccaccatgcccagctaatttttgcacttttagtagagatggggtttcaccatgttaggctggtctcgaactcctgacctcaggtgatccacccgcctcaggctcacaaagtgctgggattacaggcatgagccaaatccgggcccggccaaactgtttttaaatcactctttagttgattctttgggatttttctaaggagacaattttatttgcaaataatggcaatttggagtctttctgatatttctacttttggctacccttacttctttgactaggacgtggagagctctgagaagtaaaccgtgtacctggttgtaatgggagggcttttctggccctcctctgcctgcctcacacctgcctgttatcccagccccggctgctctgcctttgggtagtttctagggcttggttggagcagcccattcacctctcatggagccccgtaccttgccagtgttacatcactaggctgttgggcacgatctgcttccctgttgatctgattccatcatcttcatttcgttcagaaatccgtctgtgctatcggtcacttgatgatattgttctctgttttccaatgctgccacaggcttttccccttccttgtaactcttgggttgtttcagtggaatttgcctttgagggaaaacacacaggtaagtttgcttacttattttcctgttgtgctcaggagttgtgtccaagttttcatattatataaaagcccctgctttttatactttttaaaattgcaaataagaccccacttccatcgtcactgggaagcctgttattgacttactgagtcgtgctgatccaattggcgttagagcaaggcagctgtaatcgggggactacatcaggaactacttaatgaggaggaagacacttttaagtgcgacatggttagattttacaaattcatatgctatggcttgggccaaggtctgtggcatacacctgtagtcccagctactcaggaggctgaggcatgagaatcgcttgaacccagaaggcagagtttgcagtgagacgagatcgtgccactgcactccagcctgggcaacagagcgagaccctgtctcaaaaaaataaataaataaataaataatgaggccgggcgcagtggctcacgcctgtaatcccagcacttcgggaggcgccgacgtgggcagatcacctgaggtcgggagcttgagagcagcctgaccaacatggagaaaccccatcttcattaaaaatacaaaattagctgggcgtggtggtgggtgcctgtaatcccagctactctggaggctgaggcaggagaatcgcttgaacccgggaggcagagcttgcagtgagccaagatcgtgccactgcactccagcctgggtgacagagcgagactccgtctcaaaaaaaaaaaaaaaaaaaaaaaaaaaagaatgagtgctgggctcagccctgtggagtaaccttttctcgtaattgaatgaggtctaaataacgtggccaatttaggttttcacacctgcttggtttcattggtttcatccctccaaagttcagatggtatcatgagagaaacaggttattcgaatctgcactcactatcctgtaccagggcaaaggagaacagaaagcacatggggtactttcccagccggtctttcttctacaagctgccttttaggtgctaggcctttctcatttccttttcaccctctgcctgggacaggaaatggtagagcttgcatagatccaagaacagtgagtcatgccatagggccactctgctacccagaaaaggactgagctgggacccgctgaactttggatgcagttattggagggaacagcagttttttttgttttgttttgtttttttgagacagggtctcgctctcgttcatgctggagtgcagtggtgcgatctcggctcattgcaacctccgccttctgggttcaatcgattctcatgcctcagcttcctaattagctgggactgcaggtgcatgccgccacgcccaactaacttttgtatttttagtagagatggggtttcaccatgtcggccaggctggtcttgaactcccgacttcaagtgatccgctcacctcggcttcccaaagtgctgggattccaggcgtgagttgccacgcccggcctcctgctgtcttaaataatctgcactactgcattattctgtgcacatctctaatacatttacaaggaggggtttttggttaagattttctgggtcttctagtcataattatattataatggcaccagaattttaccattacttgaactaggaacagattcagtatatggaatcaagggaaactttcattttattaattwattwatttatttatttatttgagatagagtcttgctctttctcccaggctggagtgcagtagcatgatctcggctcactgcaacctccgcctcccaggttcaatcgattctcatgcctcagcttcctgagtagctgggactgcaggtgcatgccaccacaccaaactaatttttgtatttttagtagagactgggtttcaccatgttgaccaggctggtcttgaactcccgacttcaagtgatccgctcacctcggcttcccaaagtgctgggattccaggcgtgagccgccacgcccggcctcctgcagtcttaaataatctgcactactgcattattctgtgcacatctctaatacatttacaaggaggggtatttggttaagattttctgggtcttctagtcataattatattataatggcaccagaattttaccattacttgaactaggaacagattcagtatatggaatcaagggaaactttcattttattaatttttgtttgttttgttttgtttttctttgtttgttttttgagacagagtctcgctctttcgcccaggctggggtgcagtagcatgatctcggcttactgcaaactccgcctcctgggttcaagcgattctcctgcctcagccccccgagtagctggaactacaggcacccgccaccatgcccagctaatttttgcatttttagtagagacggggtttcaccatgttaggctggtctcgaactcctgacctcgtgatccacccacctcagcctcccaaagtgctgggattacaggcttgagcctccactgcacctggctattaaaattttttaacttttacttttggagactggggtctcaccttgttacccaggctggacttgaactcctgagctcaagtgatctgcagtagctgggactaagggcatgtgccactgtgcctggcttagggaaacttaatcacttcaggaagcatcgtcgtcctaatagcagagttcaggaggatgcacctaaattgacaattcccaacttcggttgacttgctttgtttttttattagtgggagcaaattttgtaaagtacatgagtaataggtacatttctcatagtgaaatcagtaaaaagtgaaaatttgcctttgtcgcaaccttgcttcattcaatgctcttcctcagaggctgagatgacctggtttaacgtgtatctttccaaacccatattctgagccgggcactttgggaggccgaggtgggtggatcacctgaggtcaggagttcgagaccagcttgcccaacatggtgaaaccctgtctctactaaaaatgcaaaaattagcctggcgttgtggcaggcgcctgtaatcccacctccttgggaggctgaggcaggagaatcgcttgaacacgggagggggatgttgcagtgagccaagattgtgccattgcactacagcctgggtgacagagcaagactctgtctcaaaaaaaagaaaagaaagaaaaccaaaccatattctgtgcatctctaagtatttatatatatttatatctaagtacaaaggttttttttttgaggggggttgcataaataagatggtatcttctgccatttgtgaccgttttcaaggaatgcatgtcagaagctaaatgctgctgctaaatgctgggggtcaggtgggggaatagagggaagggtatcatcttgggctaacataatctttggggaattaatcacaatttgtaaagaagcccttttagctttttccaagagtggaattaaaaactttttgtaattgctctgcagtgccgaagtgctttccagaaagaccgg

SEQ ID NO: 8793 - DNA, 41292 bp, Homo sapiens
gattaccccaaatctccattaaagctactgggaataaaattaacatactcacctttctatcttcaagatgtccttattatccctcctttggtcataaacacaagagtggaaaaagattttggtggcttaacaacattttctcactaggttctcccatcactgagagtgggtgggagggtttaggagcccaggcttctgttgtgagctggcccatgcaggtcagggcaacccttcaatcttagcctcattagtatcatgttttaaccacgttctgcgtgtagaaacgaccttagcgaccccccccttccccttataatgtattgcttttaaatatgaaataaggccaggcgcggtggctcacggctgtaatcccagcactttgggaggcccaggtgggcagatcacctgaggtgaggagttcgagaccagcctggccaacatggtaaaaccccatctctactaaaaatacaaaaattagctgggtgtggcggcgcatgcctgtaatcccagctactcgggaggctgaggcaggagaatcgcttgaacccgggaggtggaggttgcagtgagcagagatagtgccactgcactcccgcctaggcaacagagcaagacgccgtctcaaaaataataataataaaaataacataaaataaatatgaaatcaaactgaacctaaaaacaggctgggaatgaatgaatgaaaagggcattgttactgagagttcagatatctgcatttttgttcctgcactgccacctccccagctgagtggtcttgaaccagttactgcccttggtgtgtgtggttttgttttggtttaggttttttttcttttcaagacaggatctcattctgtcacccaggctagagtacagtggcacactcactgcaacctcaaactcctgggttcaagcgatcctcctgcctcaggctgccgagtagctgggaccgcaggtgtgaattaccatgccccgctaatttttaaagttttttggagagatggggggaagctctacaaatttgcccaggctggttttgacctcctggcttcaagtgatcctcctgctttggcctcccaaagtgctgggattacaagcatgagccactgtgctcggcctggttttctcatgtacagagtgaaaatcagagaactcatcctgatgctgtcataagaggttgggaggaggaggtaatgaacttgaaagtgctttataaactatacaaacatgaaggaatatcgcctttcttaagacagctaaatctgccacacttggagcttgattaaatctacactgagttgctactgttgagagacagacaataagaggtaaggcaggaaaactcctatgcctttttttttttgtactgggacaatcattttgcccatgcaaacattccaggtaataagcgtgctcaagggcctctccaaagaatcaggaccagctgtgtgttactaaacaataaaggcaggcacgccttgaaaatggcctaaagacctttctcagagatccaaaccagccccaccccccgcccccaggaagcatagcatattttctgtgaggccttgatggtagcatcacaaacccttgggaaacacaactcccagtgtttgaggagagcatgccgtatcttgttccagggacactgagtcgtgagcataaaacgctgcattccaaaagagacgaagaagcagtcgtctctccatttaattatagattcttcactttcccttaattgcttcagtcagcactgttgactctgggggagtcacagtacaccggcagggctattgctgttaaacaaggggtgactatcaggtaatgaggttttcattttgttttttcaaacaaacaaaccctgatgtacatattcaagtgggcattcctgttaaaggtgtcacattgggaaatgatgctcatgttgactctcctttgtaaccaaatattgataaatgtagtatgacacatacaagtgttttatggaaggaaaaaggcagcatatttaatattaaagctttcctagaaaacccgagatatgtgatcctcataactatagagggccccaggtgaccaactgagctgatggtcatgccatgggaaatacatattaaatgactcccaaagagagggttctccctgcatcatacatagacacttttcctacagaaaaagatccatgtcttttgtctgcttccctggatcccataagccctaaatgtcttgcacacaaaaggtgtccaataaatatttggagacatttgtcttaccctatcacaatacttatattcattcttcatgaaataagacacagagcccatattttgaatggaaacaagatcttttgaacctagatttgttactttaccttcccagactttcttgtaagtcagtaagaaagctggacttgtcagtcataaaaaaaattgttcaacaaacattcattgagaaatgactgaataccaggcactggagaaatctggaaattccaagcatgttcgtggtgatcacgtagagcctctaggccaagaatgttgaatgttgtgcaggctgtcatgccaccatgatttggtaagctttttactttcaaggaatatagactcgcttatgtaacctcaagaaatacagggggttattataaggacccctggaactgaaatttggtcatattctcccaatctctttctctaaatggtgcttctgtttatcttgatatgcctgcttcattctttctctataatcacttctctgctttttcataacttagctgatgcatgcctattgtgctgtattagtcaggagaagctagttatgcttcagtaacaaacaacccccaatctcagtggcctaaaataacaaagatttatatcttattctcactacatgtccaccaagggttagttggggggaaagagggagccacttgaaaacccacaatgacagagcagccacagtcttgaaaaatgaacatggttagtcgtgagctctttaagtatccaccagaagtcatttctgctcacgtttccttggccaaagcaagtcaaatggccacagccaacttaattgggtgggatgtacaatgctaccacgacattgactggggagaaaacctaaaaaattgtgaataaccttaatcacttttacacgtggcatttccagcccgacactgcaatccctttttgtttcagcagccacggctagtgattcccatttttcacgttccttaattcaaactgcaatgaaagaagctgagtggcccagttcatcattgcctgacaagccacaacgccaagtccctggttagtatttagatccgtccttgagttgtggccaatcagccagagaacagggatacacactacatacagcctgtgactgtccagcctacctctggagaggaccaggagacctgttcactacagaagaatgtgttatttaagtcatgacgttttgcttgtcctagctttgtcttagcccttggtgacaaaaaggtcatgggtggtatagcccatgaagctgacttgggcctgacacatggcagaatctcaacatgggttaaaagaaatgattgaattcaggacctgctatgttaacccatcagtctagagatcaatgatgtggtactaagggattttaaaagttagcgttgtatagctccatttccatactttgacaccataggcttcgacctctgaatataggccctaggtgagggagtctgggagaggaagaggtgaaaagaagagacatcgatggctttaaactacacaataaggtctgaatgtctgaatctggaattcaaggccctttatcatacagccccaagcttcctttccagtctcatgcccccattcacccccaaaatcctactgtccaaccaccaccaaacattcctttttctttccttggcgcatacaacggccctcctctctagctaactgctacccttcctttaaaatcagtttaaaagccatcaccttttcagagaattttttcccatctgctctgacctagtcatttctatttcttcctcgtgtgaattcttaacacctttctcatgccaaacacctggaggacatagacctgtgctactcattctttggattccagagcctagtacctgcctagtatatagcaggtactcaacaaccgtgtgtttaataaattgcttgtagcatgatttcatttaaggaaactttaatgagtccctcggctacatatggcacagtaagaaaagaaaagtcagtaacatgtggtcccgcaaggagtttctctagttcagttgcctctttttataagtgagaaaaaaggcttagagagattgtaacatggctaaggtcacactgcaaggaagtgaccaggccaggtctggatccctggaactgactcctaactccctattcttgcctcctctgctgagctccaacctggggagtcagctccctggagtccacgcatctggatatcgtccacatgcctggaactttgtcactgttccggtggctgggttgacacaccgtgattaaagggctctggtcaatttctgtgccacgcagcccctatgctaatggtcagatctaatgttctgaccattaggtcagtgtatcttttccctcctgggcagttaggttagtggaagaaacccgataaaatcttggagaggaatttgatcattctctgaaggacttacaagttgtttggcctgcctaatctgctcagataccgtccggggaatatttggtaaccatgcagtacagactgtgaattattctgtggggactattaacaagaccctcaccaaccctgcctcagctgatctcagggcttgggggcagccccctctcctcccctcccactgaagctctgaaaaaaagcagcctttcccccttgggagatgggaggagtagttaaaaataagaagtgttgggggaaatcctcctccttccaagcacagctcacacggcagagcctcctcagagttgcggctgcggatgcaatgacttagccaggttaacgccgatcccatgttttccgaaacctggcacctaagcatctaacatggaaggccgactccctaaaatcagtgcaagaaaaatgataacaagttatatctggagggacctcggggattatctacccgctggatttaaagttgaggaagccgcgggcagcaaacaaggtctcacagttgctggtggcagagtagagaccacagaccaaattgcctgagtctaaactcaatgttctttccccttagactgccacccgcacacacacgcacacatgcacacctttttggaggcactgcacagcaagcacagaagtacgccactgagtcctgtgtccctaaagtatttgactgtccctccgctgggggaaagggcaggcagaaaacaagactccgtgtgctgtcgctgtgccgccccctgcctctctgacccgcgcccgcagagaaagtctcaagagccgccccaggctttctcccacgttctccctttctctgctgcagttgagtttccagagcgtgagcgcgcaggatgacacctggctggctgagagctgccggggaggcgctggcgggtgccgagagcgcactgaccctgacgcggggtgcagcacggctgggaagcccccgggcctttggctaagcgcgccgggggacggcacaggggggcgacgcgcatccaccacctggtccgcgctctcccggcctccggcagctcagggcgggctcggttggggaccctaatggctgggtgccggccctgggagaagggcacgcggagggcggagggttgcgcctcggccccggctcggccccaacgccctctccctggcgcgcaggtttagaaacagggcggcctctccggccgccgcctcggcggctcgggtccccatatatagtcatatccaccgtcaactgggaggccggcggccggcagcgaatgggcgagcggcccccgcgggaggagcggggagggggcacggggcggagggaggagaggaggaaggggggcaggagaaaaaagcttttccaaaaaagtattggctgtcttgaggaatgcggtcgcccccttgggaaagtacatatctgggagaagcaggcggctccgcgctcgcactcccgctcctccgcccgaccgcgcgctcgccccgccgctcctgctgcagccccagggcccctcgccgccgccaccatggacgccatcaagaagaagatgcagatgctgaagctcgacaaggagaacgccttggatcgagctgagcaggcggaggccgacaagaaggcggcggaagacaggagcaagcaggtctgcgcctccccggccctgcgcccgcgcccagagcgccgggactcgagcctggcacccccggctggatccccaccccgaggactcggggagccaccaccctacccccaccaccacccagggcggccagggcgcgcgtctggaaagaaggaagggaaacgcaagagccaggcttagtctaacttagtctggtctgaggacgcttatttcccttctctggttcccatggcccgcgaaatcaagtcctagaggcgctttattctcaggactgggaatcagtttgggggagggaggaggacacccggttcctggggacgtttgaaggaagggcgagggatggagaaagggggtcgagtaactcaagtgttagaagttcgttgacttttgactggggagaaaggaaccttaaacttggggaggagaagggagtcctggagttgttacctaagaacaaagatggggcggaatggaggctacagcccgaaagccaggccagcagtggcgttcttctgtgtccccaagtagtggacttgagcccgctgagacctcggcaggagtctcgtcccagggcaggtgggtgtgcggggtgagccgcggagcggttccagctcgggtaaagaggaagttacctcgggtcctttgcactccaactcggcggcgccccgagcccgaggggccccagccaacccgacgcccgtgtgttgtgtgtgtctaacacccggtccgtgccggccgcccgcgcccgcccgccgctgcccccagctcgaggaggacatcgcggccaaggagaagttgctgcgggtgtcggaggacgagcgggaccgggtgctggaggagctgcacaaggcggaggacagcctcctggccgccgaagaggccgccgccaaggtacccggggcgcgcggcacggcgtggcgcacgaatggctaactctttctctttctctctctccctccctgtctttccctctgtctctcccgctgtccctgtccttctggttctgtgcacccacacccctccccttcgggatcacgctgcctgctgcacccccctccctccctgtaccccctggccaactcccagctgraagatgagctggtgtcactgcaaaagaaactcaagggcaccraagatgaactggacaaatactctgaggytctcaaagatgcccaggagaagctggagctggcagagaaaaaggccaccgatgtaagtgcacgctcacactgcttccctcacctcttgcctgcgtggccactccggggtcaccacagggctggagagcaatgaaggaagtttaccttttcctgctggacacctgcacacagccctgccatggcccagagcattggatgccgcctctgactgctactgcacacattcatttatatttcatccactcctctcttcttctcctttcctttacctccctgggggtggaggtgggtggatgagaggctgggagaatagagcagctgaaattggactctggaggtgaacttcacctccctggtggcagaaaacccttgaggtgtcatcaccaaggtttgtgtagagaatgccaggttttcttcactttctttccttttgccgtttccagtgggtgggaagttctgggtttggtggtgggtctagtcagggttcagagaacctggcctctaaatgaaagaaatgacacagcggtacctttacttagatggctgcacttcatggtggggcacagagacactttgaggcttcctttctcattagtgtaagccttaatccaccccttaagatctgcctgggaagatgatacttgcttgggtctgcagtctgaaggcactagatccagaaagtaagctgtgagttatatatagctcagtgctttatatggtatagtgagctagctgccccctgcccctcctgctggccccgcccccacctgtcagccttctgacaaccaccacatagttgcaggggtgatgcacacagctaaggctctcctaagctctttgtccactgccctttggaagctttttaattgatggcttgcctcttctgcctcggaaagtcaagccaaaggaccaacttcttttcacaccgttggattccattctaaaagctaattaagcctagaggcccaattagaaaagaattccttgggaagttggtaacaattccaagaatgtgtgagcaccagggaaagctatgccagcagttgaaacaccgagagcaacagcagacttttttatatgaaagtaacatgcaaataactgaagggtctcaggtcttgaaattagtgaagtcttttgtagcatgaaaggcttgagatgtatatccaggtgtgctttgtaaatgagaactccagagacgacatttaggatctgacaaaaagaaattttcagtgraaatcaagcttcctggaaaggggatttggggggaagcactgatttcgctaaaacatttaaattctaaactacctggctttggaaaaagagccaaaaaccatatatgactctgagcctactttgtataatgcagatcagatgcctgctctatatatggctaaatggaagatgcctgcctcccgcaaattctccagcaggacgtttatttagctttttcaaaagagctgctaatagatcaaggaaagatattccttataaggaaaagaatgcagagaatttgaaaatagcccagtaagactgaaggcaaaagagggagaaaaaggttactacaattcttaagggaaaaaaataggataataattattgtaactatgtagtgctaacatgtctttattgaaaagtcttgttgaagggagcgctggaatggggtggggcagaaatgggaaagaagttatttaaagtcagctggtgtgggaagcagcaggggagggagcttcttgaatcttgttttggttatttttcccaccgggaaactgcccctaaatctggcatatatggcttttttgatagtgtattgatcacattcccttttaggacactttaggttgtctggagtttggagcccgtaggaatattgaagaagttagtgaagaaatgctatacagtcatttgttgattaatgaagggggataaggtctgagacatgtgtcgttaggtgatttattcattgtgcaaacaccatagagtgtatggtacttacacaaacctagagggtatagcctactaaacacctaggctacaaacttgtacagtgtgttactgtactgaatactgtcaacaattgtaacacaaatcaccaggcgataggaattttttagttctattgtaatcttatgaggctactctcatatatgcagcccctcaytgaccaaaacatcattatgcagtgcatgaccatattgagagtattcgttttttatttactaaaaaatagtcaaaacttgaggaggaagagacagatgtcactagaaaaagggagaagtccggtaagggagaagtcagcttcctgaggtggaatcgtattacctttgggattaggacatttcattgtcattattcaccagtgtaaaacacttttacatttttctactattattactaaaaacatttttctactactttacaaatcctattctggaagtgggctctacctagcttagaagaytgtcattcaggagtagtatccctgatggtcttgtttcgaattttgtgttgtctttccacctaagtcaaaagtgaggctgaaggggatcgaagactccatttttttctggcccccaatctcttccccagtaactgtgatatatctgatatttatagcatatgagtctttatccctttgtaggtctttacttcttaacttagggattctcaaccttctctaaacataatcacttagggagcttttaaaacccaaagttaggatgcacccaaagccagttaaatcagaatccctggggatgcaacccaggcggcagcatttaaaaaatacccaagtgattccaacctacagacaaggatgagaaaactctcctaaactcttgtataatgacatcggcatgaaaatgaactcacctgaaactgaccttcccaggacattaagtcactagttggctgcttatggcacttgccagtgtccagcagtttcctggctgctcctggaggttgccagacacccggttcccccattctcaatgttggaggcccacagtctctgcacttaggggaccagctgtaacctccccacctgaccagatgaaccgcggggaaacaaagcgagaagctcccacctacaggatgcaaggacccaagctgggatttgtgagagtctcagcagaggctgtgaggaactccacagaaaatgaggcaggaaagcaaaagttccttgttagggcttggaggaggagagggttgtcaagcatgttttctttattattcccacacataagggagctggctttaagagctttctgtgacaaacctgaggagaaaaagccctgagacttagaaggcatttaagaatacagctcaagggggaaatcggtggagactgtatctgcggtggttttctccacctgtagccagaggctctctcatagggttctgtggctttccttggggtgccttttaaaggcatcccagtccagcccaggactgactggattccaggagatctcagaggctggtctgacaccaaagaaggctgtaaagagaagagaccatttggatgactgttttcatggaaagtgagccccagggaggctggcctgagattacacagctgattatgggcctcagcctgactcttaaaacaatgcttgtgtatttcttaatcgtagctatcatttgagtttttaactatgtacaaggtattgtgctaagcgctttacagtccttcataattctcatagcagccccatggggaaagtactattattattcccacttttacagatgacgcccagagaagacaggtaatgtgtccgaagtcacgcagcaggaaactaggagccagagtcaacctaggaaaactgcatttagaacaggaggtctaaccactgtgctctacacgcgggtggttttcacttcgtgaagttttggggaatgggggtagtgcttgggttataatcttgcrgttgggatcaggccctttagggcatattccggctccagacccgccgctcagcttctctggctccygggcatgggaatctggactcgggagcggagcgctcccgcggccagcaggagtcgctattgcccttagcagccagctccgttaccccgggtcaccaccgcgccgcggaggggccctagaagtggaagccagagccctagtgcagtggcctcccggagcgcccagctcaccaggtacccccgcagcgcgccgggagcgcctttctccccgccgccgcgagcatgcgcagtgcccccagccagtcccgggatccacggcgcgcgcccctcccagccgcgcgcgcccgcctgcggtttgtctgcgcagccctggaggcygcgacttccggactgctcctggccgcagggggcgccgccrtcgcacagagaggcctgggcggggcggaccggcgctgggcagccaggacagccgcggcagccgggtccgcagggcagcagccggcctctcccactgcagccctcccgcccgcctaccgtccggcgcgatggcggggagtagctcgctggaggcggtgcgcaggaagatccggagcctgcaggagcaggcggacgccgctgaggagcgcgcgggcaccctgcagcgcgagctggaccacgagaggaagctgagggagaccgtaagggatacacccatcaccccgcagcccccagaggcgcatcctcccggggcagccccgcagggccctcctgcttccccccccgcaggccccggtccctcgtccccacgcctccagggcgcacctggcgcacctgggccagctggcggcgggctctggggaggggmccggcctgttctcctgagcctttgttttccatctcgctgatccaaagtaaacgctcccaggggaaacgggtggtgttgagaaggttctggaaggagcattttcccaggaagggtctgtttctggggtggtggctttcagtcgtgtctgtgcgtccccgggaggtgcactttgcgctgctggcttgctttactctgagagtggagagggaggaggtccttcctcttggagatccgtactttgagaaggggcgccgacaggtcaagtgggagaggcactgtggacttggggcccggggatgctacactccgccgttcccgtcgaccctgtggtttcccggcggcctgtgtctccgaggcggtagacagacattgacagcttgacagcgccgcgttctgctggaagagctaaactatagtgcaaaacccttmacccgtcccttttttcagcagtcctcctccccttttctctcatacagatagataatgctttgttaccaagtcttggaaaaagttggcgaaatgtcaacagttattgggtgtattctcttgcgggcttcccctcccccttgttaaatgtaatacctggcttccttcctttcttctaaggcaaatgtatccagcaaacacgaacaggatttcagaggtagtctagtattggatatttgtcgattttgtgtgtgtgtgtttttaatgaagatactgaaacaaacaccttgggagttttatgacaattgatagtatgatgtcctgctgtgcttaatatacggggttgttctgagttgagtaaatcgttctagttaagtgtttgtaaatggctgtatggctggccacagaaacttcaagacctgaaatggtcctcttcagaggaaagctcaactagagaaagtttcagataaaatacaagcaggaataaggaaattaayaggcaaaagataattctcagtatttgctttataggacgagtcagcaaaagtcctgtggatatccctgaacttggctgggtggtaaactaattccgactcccttactcgctagtagctgtccttgaaccattagaactatatagaatatgatggataaaaacaagaactttggacccagactgtcagaacttgaatcctgtctccactacttactagcagtgggcaagttacttaatctctgtgtttcagttccctgtgtgtaaagtgtggatagtaacagcatctacctgtcggttaaaggagttactatgtaaagacagtacactgatgcttggcgcaaaagggtaagtgctgtgtgcccgctgtcattaaaactgcacagccctggcagcccagtgctccttcaccttcagttccccacccagcaagaggtcttaaagatggcctgctcatttcatgacatcataaaacacttcatttactgcttttaatcaacatttgttggggcggggggcttgaatgaagaggaagtgggcgggctggtaggcatgtttgatgggttaaagtggtatcagtggtagaagtctgaggtctcctcaccctgmtaagaaagagtatgtgtgaccctatgcaggagagccttgtattggctcctggcctagtgattgatgttagacacaaaagataaattttatgaagggcacattattacttttattcttaccttctcttttgcacgtcgtttttataacagaactcttcctgtgccagttggctaaagatagtactttcgttcttttcacggctttatatcaaaagtagtttaagtagtttcaatttttttaagtaatctttgcaaacaatctacctgggtgattgattgaacacagaaccttttaagacagcaacttgaagactggatcagaccattgaagagagactttcaggctgcaagttgttcctaacttctgaaattggaacttaaatgtagctgacttaggtatttagatgtagcttgggctgtgagttaagctagcagtaacagtttcttttggcagcaaagataaaggtttagtgacaaaaccatgagccactgcaaaaaatatttgaccagagagttggcctaaattcaaatactcagactgtaattaataggccctattaaaccagcccttaccttggaaaaagcagccatcccttacttcctcctagtctgtgtttccaaggtgtgtggatccttcaaaatgttggaatgaggctactttgcttgacatgattgattccagatcttgtgacccactagggttatgtttgcttttttycattatttaaagaaaaaggcaggatgaatcttcctttctgagtagtatccagcaaacaaggagacagggagttgtggccagaaggttcttamttagtaacatgattaaatcatgggaaataaccaatttacaaaaattcccagcactttccctctttacacttggtaagtatttccgggataggaaaaccgagggtgcattttgtgcttgcattggcactcccagagtggctgttaactggaatgtatactctcgatttccgctttcatatgtaggcaaggcagaggcactacaatgccttgttcatgtctgytctccctcattatacaaatatgcttcataaattatgggctttggcacacacaggaggttgtgtttatctgttatccatgggagtgccccttaatgtcatcagtgttttttttttycccccctttccttaccatataagggcagaagtttagcttggctgtggtcacttggccttacacagcaagttgggtgaaaccttcttcgtataactacagtttgcatgaaataaaaagacctgacctttgatcatcccaagttccactccagttcagtcaggactttggaaacatattccagaggattgatttctagattataatattctcccaccagtattttttcttaataaccttaactggaatacttttttaaaaagtaaaagtcactgccatttttaattttctgttgttgtattggctaaaacatctggatttcatgaaaatctaggcctcataaaagttgttttttttttttttttcaaatctgatttgggataatattatactatggtggggtgggcatgcccttgatttctatatagtaccatgttggggtgggggaatggggtgcatgcccttagaggagggtcatatgcattgtaaggcacctcaagtacagagcaccaggaagttacttaaaaacatctgcaggaggacattggtagcctttactaatacagcagtctcttttttgagtagttcattaattgttagaacacaatagcacttttgaaataaaagaaactagcatcccagattgaaagacttcactggcagtcagcacatgggctgctgttagaagaaagctaacttggctgggtgcagtggctcatgcctgtaatcccaacactttgggcggccgagacgggtggatcacctgaggtcagcagttcgagactagcctagccaacatggcaaaatcccatctctactaaaaatacagcaattagccgagcatggtgtcacgtgcctgtaatcctagctactggggaggctgaggcaggagaatcgcttgaacccgggaggtggaggttgcagtgagccgaggtcatgccactgcactccagcctgggagacagagctagactccatctcaaagaaaaaagaagaagaagaagaaagctaactcagtacactaagagtgatttacatgcctgcaaataatttgtgtctggggtcttgaccctccccaaatgccttgttatttatatctctgcttttagataacagatggtcatgtgtctatgggcttgtaccggcagaggcaacagcaggtccttaagactccccaggtgccatgatgaaaagaaccttagaaaatattgaaataakctcaaaacttaaaaaaaaaaataccagaaataaaagctagtaaaggtgagaggtgtggggcttttggaacatagagcataataaatcagaataaaaagtaaaaataagaaagagaaaaaagtggccctgattaaattataaaattaagcatatcttgaattctaacgagccaaacaaaaattctactaggccagtataatagggcctgcagagcctgtcatgggttcagggttttcccataaagataggtgtacctcagatactactcctaggtcctggctttaacctcaaagcccctctgcctgtcctgctctgaaacctctggggcagtaggcattgacttctgggctagggagtaaatgttccgtgtcmttatgtgagcttcctattacccattagcattgttttatgaagttttcaattttatatcctgcctcatttcaaaaagattgtgataatcactttagcagatgatttgcattgcagcaactgttctcccagtcctggttaggatctgtgcctgaggccttttgtggggagttggggtgggggccggagaacatctcartctgatctcaggagagataaagacacaggagtgagaactgccagttccaaggtttccgtgatgttccgggaagccaggagaagtgacatagtggaragccggcatgctgggagcctagtgacttggatcttaatcctgtctcacactgatggctgtatggcctccacatacttctgtgcccagggtcagagttccctcctgccgcctgtttctagtcaagagctagaagaatagccagcttctttgggtggtggcaaaggggattgtttatttatagtacagattcctgccctccccctttgacctcctgaatcagaatctctagggacacggcctggaagtttgatttttttttttttttttttgtttttgagacaagagtcttgctctgtcgcccaggctggagtgcagtggcatgatctcggctcactgcagtctctgcctcccgggttcaagcaattctcctgcctcagcctcctgagtagctgggattacaggcatgtgccaccatgcctggctaatttttgtgttttttgtagagacggggtttcaccatgttggtcaggctggtctcgaactcctgacctcatgattgcccgcctcggcctcccaaagtgctgggattacaggcgtgagccacagcgcccagctgaaagttttttttttaatgctcatctctgagttgattctgacactcagccacttgtgggaattgctgatctggacaatgcctagggatccttctagctaaaaaattgagaccctattttttggatttacagggcctcctcagraaggggcagccactctcaggtctgctgtgtgtgccctaccattcctcccactatatcacaaactggcacctagaaactggtctccatgcccagtcgttgctggggcaccctgtatgaagccctgctggctggtattcctgtaggacatattctctgatgtccaggagtctgaggttctacagaatgcccctggggaaacaagagtggcatttagacaacagcattctgtaaacacagtgccaagagctaagggaaagaatgggggtgggggtgatcggagggaagacacggatggattggtaggggccctttgggtaggaagatctcatgtgcaaggctggaatgaacatgaggtgctgtytccttcctttctggtgactcggctgtgtggggagctggggatagagacctgtcacccagagggttctttccccaaagcataaacagtcgtctttctgtgagtacaaagtccttgaggttcaggcccagatctaaagcagagcagagaacttggaacttggtagctacaaaaaagttttgaaaatcttgctggcatttctctaataggccatagcctctgtaacaaggatatttgccatcatattgaaaatgataagaaagggggaaagaaaagaaagtgtacagtgcttttgagtacataacctagacactctatggaggctttttgttgttgtagggcttttggtttgtgtgcttggtttttttgtgtggctttaaattttgttttgttttgtttgccctttgtttttgcttccgctttgagtctcccccccaccctcaaaaggaatagaattttactggaaaatgaaaatatagaaaagtgaagaaatcttacctgacccaaaagtatatccttaatatatacatccttccagtaatagtaataaaaaaaaaaaagcctaatggtttttaaaagacacttccctataattgagagatttgttatcctattaccctcacccttcaatacacacacacaccagaaacaacagtcatctgccagtaattcctagctgggtccakttaccagctgtgcactgataatgatttactttgtaggcastacagttgtaaatgctcttcctctgatttatttcacatttgccctgctccctgcctccatcaaccaattactacatttttgtcaagataaaagtgtatttacatgtttttatagagtccttcaccgtggttggagatgccctactcacctctcttcccagataaaacttggcatttaaaatcttacaaatctaggtgagcaaagagctgaaggttctcagattcctttgattaaagactatgaccacagtttctaactacatttgcatttccaactctgtattgtggatccataagctgagaamgttgcttttattaaaattaggttggttttactcatcttactgagcccatactctgtgcagagaactgtgagttctctggatgtgagcagcttacagttcaatgacaaagacagggctgtgtgtagagaaatttgttatcctattaccatgggtccctaagtgtgtattgtaatttctagaaaactcctaagtgttctgaaaaccccaccaccccttagtgaacatacattcaaagtggatgaggatattttacctgattagtaaattccatctcccacttccatgcacaatatttaaacagccaccagtgcaagtgtgtataatggaccatcatagtcttataagtgttctgaggctcatagcaacaatttcttatgacaggaaaaaaatcattgcctctcaaagaaaccaacattttatttcagtgacagataccaagtaaaaacagtacttgtattatttttctttttaggagtttgatacttttcttgtattaaccttgacttcaaagaaaaatcataggcttacatcaaaaacacttgggaaatttgtcttggctctgttccaatgaggccagttattctaaaaggggttactggattgtgttgggccttcatgtggtgtgtattttagaaccactgaattttaaactatttaagttcctttgtaaggatcctatgataaagtrgcttgaaggaaagagttgagtgaaactcttgagtccgatttctggctgtactgctattgtcttacatggctgagcctgggtaagtcttgtctcagttcacacttcaggcccccagtgagtgaggtggccgtgatgacgctcttgtttaacaggcaagtaaagccagggtgttgaactctacggaagtgggccgggcgcrgtggctcacgcctgtaatcccagcactttgagaggccaaggcaggtggataaggaggtcaggagattgagaccatcctggctaacacggtgaaaccccgtctctactaaaaatacaaaaaaattagccgggcgttgtggcgggcgcctgtagtcccaactactcgggaggctgaggcaggagaatggcgtgaatccaggaggcggagtttgcagtgagctgagatcgtgccactgcaccccagcctgggtgatagagcgagaccctgtctcaaaaacaaaacaaaacaaaaaaatctacggaagaaaggaaccatgtgaaagagcgtttgctaatgatctgtctgtctgatgagaattgtgtgtatagatttgtgtatacacaaatatggatgttcactgtataaatcaatgtgtaaatgtgtccgagaactccagagttgatgagggcttgtaatgcacttaaaggtagctcaccacaagacagtcttcctatctraaatcagcattgcagtcccagccatttcctgaagctaccaccctcactttctccccaactctgaaatgcttttcactctctacctaggctgaagccgacgtagcttctctgaacagacgcatccagctggytgaggaagagttggatcgtgcccaggagcgtctggcaacagctttgcagaagctggaggaagctgagaaggcagcagatgagagtgagaggtgagaatgcctcatcagccatcttttgcagctgcctttcctggtggaataaaccggagggctcctgtgatctttgaggtttaagaatttttcagtcccctggtggtgggatcatttcctctattgatcccaggtataactcggttggttttgttcatttagcattagtgaaacacctactatgtccaaagcactgtcctaagccctaaggttacaaagaagaagatgatcttgttcctgcccttayagaactcaccatctaatgagggagacagacatgtaaaggagaaatgtcagggatacaagttggccctttcactcctactgaccacagagcaattgtgcattttttaaagtgtaactttattttataatatacaaggaggcttaggtgtaaataaaggaactgtggactatcagttgtcaaaatagcttaacaaataggtggaagaaaaaacacaaagcagaaacatggtctgcaaaagtaaaatattttggacttggtcttagtaatatacacaacacacatgcacacaaatagtcagatgctcgtgtgttctgagcccacctccactgtaatctggctgtagctgaattattactcagattcagctttgtggtagtaaaggaaagcrtggttcgtatagaccagcacagccttgtgtggtctaaaaggcattttcccttaagctcaactgttggaagtaaggatttgccatattgcatagaagtacttcaagagagactccatgaggtgagagagcgttctgccgcttgagggatggcatagcatgaaggggctcagagcactgaatgtgtatctgtctgtgctgtgacctgggcaagtgaatgcagtcagtcatcttgtccatttcttactctttgaagtgaccctaccaccaggtaccaggtataaagagtgatttcagactttaggattaaagaagatttttagctaaactttttaggccattattcaccgctgcttagtgtttcttcgctaaccaagcattttggacttctttaagatgactaagcatcttacagtgtacgcataagagcagttttgtggctgacttctttctgaaatatacttgttagtgttccttaaaggcagtctggtaatgttagacttcggagtaaaggggacttggggatcatttagtcccttagttttacaaatgagaaaagtagggctcagaggctgatgtgacttgcaccaaggctcacagcatatttgtggctaagccaagactccgacccagatctcctcaactgtattccaatgcttcatcaaaagatagtgggccagatgtggtggctcacacctgtaatcccagcactttagggggccgaggcgggcagatcacttgaggccagggattcgagaccagcctggctaacgtggcataacccctaaatctactaaaaaatagaaaacttagccaggcgtggtggtgcacacctgtaatcccagctactcgggaggctgaggcagaagaatcgcttgaacccagtaggtggaggttgcagtgagccaagatcacaccaccgcactccaacctgggtgacagagcgagactctgtctcaaaaaataaaaataaaaaaatagtggttcacttatactgcctacttaaattttgataaatgaattccattttacatgacttgttattccatatatctgtaaaatatcataggtcatttagtatttttctgaaacattacaccacgctataggaccctaatatacaccatgccataggaccctaatacactcagtgtagaggacagtgtcaggcctgtctcccagcattgctgtcatgaaagggttccattataggtaaaacttaatttgatgcattcagttgaaccataagaaattgccattattacttgtctgaaatggtcaaatatcagcattctttgtggacttaatagtttattaaatctaacattaagtctaatatttttgtttatgggtggcagggtaagaagattctttgtagaaagaggtatataaagataagtttgattttgttctagctttggttcatgtgcaagctgaggcttcccacaggaaaggcaagaaatctcattatctttttaatagtaaagcatattggcttttccggtttcatactgccaagattcagacagattcctgacrtggtacctttcgtcatcattaatgttagatgcctgatagtttcatcagtactcaaagtgagagagttcattcacagtgaacagagagaaatgtgtctcttttttccacctttagctctggaaattgttgtttcctggtttggaaaataaaagtagctctgtgctctattttggtctaccacttacactaagcctcacargccacagcagtgcagtgtgcatttgggaagttcagctctaaatcttgggttttcttgcttgtctttcttttcagaggcatgaaagtcattgagagtcgagcccaaaaagatgaagaaaaaatggaaattcaggagatccaactgaaagaggcmaagcacattgctgaagatgccgaccgcaaatatgaagaggtcagatcctggggcccaaagccttgtggacacccagcagtggccttcaggaagccagggagcaatgtacagtcttgattcccgagtgaggccatctgctttgttggcagaaatgggtggttttgagaagcagagttcctttgtgtccagaaaacggttctaattttaatcctgctaggggatcccaggctttatcaggaagccaatcagtarcactgcgaagaaggaccaaaactcctctcccccagccacaaagaccckgacaaaagatctttggccggaagggagagttgggccctgtgtcttgtgaaaggaggctctcatgctgtcatggtgcaagtcatttcttcccagagtgacctggcacatccagattgggcagcttagagaccacagacagtttctcagtggattcacagaggcctctctcctcaagggtggtagaaaactattatcaacgcaggttttcagcagaatttgctcctggtcgtgtccccatgaaaacagcctcctgtgataagaggcaacttgattattaaggtttctgttttttccttattggatcacatcgtggctatcctgaaacagcattgcccctcctttttattaccattattaccttcagattacactatgctcacaagttttgatctgcttcagaggctcccttcctctctctggttcttccactaaatacaaatttgattttgtcagttatctcaccaacttgtctcacgttagtgtctcttgtattcttccactgcagtaaggmggtagatgcacagatcagccatcaaattgatggagttcttaggtttactttgttttcctggcagcccccacctttttagtacatgtctcatcctactgctgtttttgagattgtgaatgtgtattttatccctccttccacattttggtctggctgccggttcacctaggtcagacttccaattgagactgcccaatcacagctaaccattctgagtcaaagcagaagcctctgatctcctctctgctggcactcctaatagagagttgcttctctctggtctaccagaaagaggatcatattgttygtagacaaaacccttagggcctgatgggatctgatctctacccccatgcccttctgttacacaaagcttgcaagacccatggtgtgtgtgttgtgtcttcctgctgcaggtggcccgtaagctggtcatcattgagagcgacctggaacgtgcagaggagcgggctgagctctcagaagggtaagcgggcccggcgccaggaggccacgaatggggtgctgcagagcagtgactaaacagcatgaccttctggcagctgcacattacctgtttcagctccgggctccttttgtgctcatttgatgtggatgagccacgagtatggaacatggaggactcgtgtggggtgtcttatgtatgaatgcgtgtatcactgcatgccttacctgcacactgattttgtgaatggccttgtgcatttcctgtgtccactaacagccaagtccgacagctggaagaacaattaagaataatggatcagaccttgaaagcattaatggctgcagaggataaggtactgatggctcgtgtggtttttaggtttaactgcaacccagacatctttcagcttccaatgcctcctggttcgtttggtataacgactgcaccttcacttcaccctctgctatttatatcttgccttaagtgctttcccttggtcctttatgctcctttgttttcccttcataaatgctctttgggcagccaaaaaaggagccaaattatcgcacttcaaagttgttggatttggtcaccctgccttctgctgttgcgaggttggggggcagtgttcctggaaaamctaaacattttaatacctgatgatttggctactttaaggcagcccttcgtctctaggactcagttttcattttttcccatccctctcctttttctctcctccttcctttggcttgtctcccaccctttctgcctctgatcgaaaacattagcaaatgtgccgagcttgaagargaattgaaaactgtgacgaacaacttgaagtcactggaggctcaggctgagaaggtaggccaggaggatggtgtgggggaaaggcatcttttaagagctgctcaaaagaggccctgccagaaagcaacacttacagtagacattttagtaaaatggcaatattgtgaggtgatttttggagagttactagataacaaattcttttttttaactagagaatttattttatgttagggatatgaggcatcaatttaatttaaaccaagtgccaagtggataagttatcttgttgttatcccatgtaaaacaataggcaagaaagcagagaatgtattgcagtgtgccatttgatatcagaggttccattacctcctaagagatccttaacatctgttggctgagctggcgagttctttgcatgagaagccatgagtagattgagctgcagcctgacatctggaatgctctttctaattacagtactcgcagaaggaagacagatatgaggaagagatcaaggtcctttccgacaagctgaaggaggtaatatgagagttgtggatgaagccaactggattttaaatgagtttgttttcatggaaccggtcagggccttttcattttaaagttccaatgatccaagtcaggaatattcaaaggtcrccttggagtttatgtactgtgctaactgccatttctcacagaggtgactgaaactgacaagtagtttctgatccattttataggtgatgtgcttcattttcatcctctagttttccctatgtttgtagctacaggaaacataaaacttcccaactttaactcaaataaatcattacaggctgagactcgggctgagtttgcggagaggtcagtaactaaattggagaaaagcattgatgacttagaaggtaagatcttaagtagtgtttttagtttaatccttatggttgaataccaacctggcaaaacaattttccaattcaagggcatccacattgatacgctcctttgcacttgcacattcttcctgtgtgtcctctggggtttttctctgtggctcttgaactcatgaacctaagtcttctgctcacgaggtgactagttagccaccagccatagtggcaaatgccatccagcttgacttcatgctcattacaagtgtggcaggtttatttttcactgtgagtgaggtgcttattggtgagaatgactctagtatattttatatctttagtgttacttcctaattaaattgggaatgatgtggtgattgtggtcttgtttttagaagaacccatcttcttccaagtatgaattcaaagtaaggatttaggggttwttttaagtcatatattatcttaacaaaatactttatatcctgaaggaggagggaaaaattatayttaagcatttcttccctaaggcacttaggttttattttagtaataaccactctatctcacagatatcctaaatgttgagctttgaagcttgtgaaggattagctgtgaacaagaaagaaaaaagacaaatatctacatcacagaagggattagagaaggaactagtgtttggtgcagataataaccaaaatagtggagaagagagaatgacaaatggttgcaaaatgatctgccaaagtgcagcaaagtatgaaacctgcagcattacaaaaactaagttgcagacttgccatataaagtgtggcgcccattgcttttcaagcctcctggaccagtaataggcagcttgagtgggaagaccacaggagtagcttaaatggcactaagaaatcgctatcccagtggtctagtgtggtcaggaagtcagtggtttgaaggtggaaccagataaggactacaggctgtagtcacaaattgttcttccaaaacactgcccttgcatttttttcccattgtttatagctgcagatgsctgactactccagtgtaattaaaatatagctctgcaaaagaaagatgttccattagcccctgcctcccctcaccaggagacagccttctgtggtttcgtttacaatttaacatggtttactgatatacctaccatatttgttaggattttcatattgagtctttttcattttattttctaatgggttttgttctctttgtttttgtttcaatttacttaaaacaaaacgcacgcctcctgcattggccacctgctgcggcaccaaccccttcatgcattgcccttttcttgctgctgtgttgggatggtgcgcgcaccaccctcactcaccctccatttcttgatcactctccatgttcttgcacctctgccttccacttcctggtcatagacgagctgtacgctcagaaactgaagtacaaagccatcagcgaggagctggaccacgctctcaacgatatgacttccatgtaaacgttcatccactctgcctgcttacaccctgccctcwtgctaatgtaataaactcaccaccatgccttccttgctccctaatctccatctttgcactcttgtgttcaccctttttgtcataacctagaatagtcattgttttttcactttctgctaatataaaggccaattagattaagtctgtctatacaraccattttcttttcagaatccgtttattttgtaaacrctgaactagagcagtgaactagaatgagtgrccttgagcactgtccttttgggaaattaagctaaactcaagtaaaactagaaggccatgccgtttgttgtacaggaacttctcaaaaaatatcaaaatttgtttcctgaaattcaactaagtacaacataatcattttcgttaaatataatttgaaggaacccttaaagtgtcaggttattgagaatctgaggataaggaaattggcatgatccaatacagctttaacagtggtactacaaaagatcatctcttttacttttaagaattctagagtaggccgggcacagtggctcacgcctgtaatcccagcactttgggaggccgaggcgggcggatcacgaggtcaggagattgagaccatcctggctaacacggtgaaaccctgtctctactaaaaatacaaaaaaaattagccgggcgtggtggtggatgcctgtagtcccagctactcaggaggctgaggcaggagaatggcatgaacccgggaggtggagcttgcagtcagccgagatcgcaccaccgcactccagcctggacgacagagcgagactctgtctcaagaaaaaaaagaatggtagagtaaaaagaaccctctgctgagtaaccaagcctttaattttgtgtttttatgaaaggaattaaaatacccacgataaatatttaccacaacctgtgtcaaataaatgggaaattaaacacagattgtacaatgtgagcttgggagttaatggcccagattttactgttaggcagtaagagttggagtaggtagtcttgttatcatgagaagaaccttgaacagatacaactaatttacatattactaaccaaacttaaacattaaactttttctactactttaaattctaacctggaatgtttcagagttcttcattctaatatcaccctgaattccattgaagctggaaatgtcattttccaagcccacctgtcattcatttacccatgcagaaaaaatggtaacttgaagagagtggcatgtgcctgctgccttagaggttatagaatccccacagtcaacaaaaaagcctctagagacatgactgttgccatggaaaccagagaaaatgtgtcttctcatccctcatttgtaaatgagggggtggagcagatcatctgtctctaaggtctttttcagtgctaaaatgtggtgattctttgggaaaaactttttgcatcaagtatgattaaatattctgaaagacgagtgtagcttaaaattttttttgtttttaaattctgttcatgggtcttcttaaaatggacccttgccgaaaggcggcctgtgacggcctcaggtgggaagatggatgtccttccaagggtgtggctggcagtggggtttgcatgactgcttcttgtctgtgtttcaagtgctctcatctattggtttggtttcctttcttttttttttttttctcattgtgccactttttttttcctcccacctttttatcttcacgcagataagtttctttgcttcacttctcccaagactccctcgtcgagctggatgtcccacctctctgagctctgcatttgtctattctccagctgaccctggttctctctcttagcatcctgccttagagccaggcacacactgtgctttctattktacagaagctcttcgtttcagtgtcaaataaacactgtgtaagctatttctgtttgctattctttttacttcttatttattgacattttagtttcaacattgaataaaactacaaagctgcttcacacatatgagggttagtgtttggctgctgctttttctttttaaatactgaacactatacagaattatatcaggagtttctaaagcagtagttccttgttgaacttcaaaaaaatacccaggcctgcattccctctcagagttctgattttcaaaggttagaatgaggtctggacatctgggggggttttgggggaattgtgatggctctgctttgcagtctgggtcacacaggggacattgcttgttgagagttgaaaggtctggcttgatcagtgtcttcctttgctggaggtttagctcgggatgtagtgacccctctgtgttgattatttcggtggccttacttgggaggacctggctaactaatgaaaggctcatgatgaatggttctgtagctgtcccatattactaggaagttatacattgagaagggtgaaaaagaacttggattcaaacaatgtaagttttggttattgtcgatcatccttttatagcacaaagaaaagttcaagcttttttgaagtatattcatgactcagccacctttattttgatcatgaaaatgacatcttaggttttctaaatatgattactctgtttagtcgtgatttgttttgtgctttttagcacatactctttgggagggattgtacataatctttgtgttcaatggctgtgttttcatttgtggacatttttaaaatatagcaatgaaagtttctttttttttttcccaaaaagatagttggtggaaattgttcagaagacaattgtatttcatttgggcttctgttttatttcacaaacagcaattaagtgatttttttaaaaaaatacattgcaaaaaatagaactttaactaatatggactttagtgttataattcccaacatttctccttcctcaacaatctagctatatatttctcctgttttttttttaacatggatgatctgcatgttttgtatatagtttttttagcccgagagggctgatataccaccatactcaaataaatttggacaaactcagaagatagtgtcattctcactctacagagacttcaaagcatagaggaaatacttttttttaaagaaagctgtgaattaaagtattttagtcatagtatggtggaattttagaatctggacaatgtctctcccttgagtttataaagacttccatgatttcmtgcttttcttttcttaaggctccttgggcctgcttctgactatgattccttcctcattcttttttaaattcagaataagagaagtgtacccttctctgagtaaatcctgcttcctgatgtagacaaaatgccaagtctgaaagttctgctgagcagatgttcatgtaattctggaggcacatctgtgttttggaaatccttccagagactttcgcactttctataagtacactctacaaggggaagtggggcactaatggactgggagggcaggtcaggagtagcccaaggtatgcatgtgcaagaggaaaacttgataaactcaagtttatcaagaaattgttgatttcttgttcaactgttgatttgaaccaggcttctggttcaaagggccaggccatagctacagctgctctggtgggccaaaccaaaagcatcactgagtttgggcacttgaagtttcagacagctgggagtctccatagaacyggaagggaaaacacttccaaggatatgagcatgtcttgtccctgcctttgggccacccatgcacaccagctccacagcagctgaagcagagcagatccagaggaggctgtcggagggaccactgtccttcctgctgaattcatactgaccctctggattctccagattttctccaaagttcttccattctagcctggccaaacatttgggctcagcaaactgagacaagctccccacccatggcgacacttcctatgtccatagtgtgaatgtagtaatgggatatatgtcttggaacccccaagcatatgtcacgtgcaaaacaccgtgggaagcagtgggggtgtggtaaagagatgggctggaaaggctctttgtcctcaataagctggscatctgatggggagatagaggagtgaagcgagtccgaactaataggcatgtgtatttggaggcaacaaggaagagagaaccattctgactgggagctccctggaggaggtagcggacrtttgactggggtttggcatattcaaaaaatgtggatgagcaaagaggacagagcagcagatattccaagcgagaaaacataacgagcatagcatcctcccatgtcctaccatttataagagaatgttaatgtgagaactgctcagtctcctgacagacccgggggctgcaggcacattttccctaggggtaggtctgttagcttttcaagatcatgaagtatttttaggtccaagttgtcaccagcattsaaagccaccgtgcatcctccagctgttcccagygcataccgggctcttgcttgtcatagcttggatgtcccctggatcatcagatacagactgactcctgcacttgttttcccccgtaagcagatcacgtgtcagtgtgtaaaatgtatatcacgctggtcttcatgtaggtgttgcaagtttcgttcattttatacacatccattagcaccacacatgaatgccatcctcttcaagaagtaagcagatagggctgggcgcggtggctcatgcctgtaatcccagcacttcgggaggctgaggcgggcggatcatgaggtcaggagattgagaccattctggctaacacggtgaaaccccatctctactaaaaaaaatacaaaaaaaattagccaggcgtggtggcgggcgcctgtagtcccagctactagggaggctgaggcaggasattggcatgaacccgggaggtggagcttgcagtgagcygagatcrcgccactgcactccacgctgggggacagagcgagactaagtctcaaaaaacaaaaaaagcaagcagataaattctaaatcagtgttgagtggtgacaagtgcttgttcttttgctgtttgaatggataacactatcaaagctagacaggagtcagaatgtgtaccctgtattgtggtgactgggggaaggacagagacttaattccaaatttcaaaaaatttcagtgcagcaaaagcagtaacccccagttggtcctacctgaggggaaagcctgccctgtgaacggagaggaaaggggttctggaagaggtgggcagcactgggcaggttgatgtttcacttaagttcaacactgagccctagcaaggggtggatgtcacgctgggctcgcctccagccaggcctgcattcccaaatctattgccagaaaccatgtatggctcagctcacaaagtggtttagtgaggtataagaggaacattcactcttcttcctcctcttatcctgttgctcctcctcccctcctttcctcaccaagagagaaattctgacacttcctaagtctaccaagctttttagggtctacccttcctggatacaggacaggtgactatggggtaagagtaaactgctcagcaagtgaccagttgctgtcctgcttgaggtctctttgtgttctctattaactgcctctcaccaagtctgctaacctgtcttccttctgcctcttttctgctaacctgcttgctgacctgtacagatcaactctaccagcaacttgagcaaaatcgccgcctcactaatgaactaaagctggccctgaatgaggattaaacttaagagtgaaaaaacttgggctgaattctaggcgtggagcccatgtgcagaaaatctaagactgtcctaccttcaactaatagagttgaaaacagttgctttctgcagaaatgcaaatgcaaggaattggctgaaaggctggccttgcctgcttgtttctctatatggctggaataattacgttctctttaatcacaaaacagcttttatggtagaatacttatatcaattcakcactgctccttgaaatagcaggtcctcttgtttgaactgataaataatgaggagcccccccaaaaaatgttttctatttcctgacagccatgagtcctactttaagtatgtatatatatatatatatgtgtgtgtgtgtgtgtgtgtgatatattcctatcagatactcatattcctaacttctaaatatctggtatagtgtttgaaatatgattaaatgtacctatgcttgggcaaaatagcttttgaaaacaggaactcatgccagaagcccctggttgtctgaaaggtatgctttactcagtctaatggtgctgttggagtctggggagaatgtcatgctaataaatagaacactataaaaatattaagagaatgtcctaatgaagtgtgcatgaaacatgttgacaattttttatgagcaacagaaataaatcattttaaaagttctcagaaaacctatttatgtcatctttgcttttgtgagtttgtgttaccgcacaactcccagacttttaactgcctgtaccttggaaatgtctgctgttcgtaacttcttcagtttgtataacagtgctgcagctgtatttggtttttacctctccctgttcccacggcacaccgtcagtgaaccytcaccaaacmcyacgtgcattttatcctcagtgaattgttggtggaggtgcacctgactgctctgtgagaatccgtgccatggctcctttgggtcaaagatgccctcccctccgtcttaggttcttgtctagaaatgagtaatgtcttacaagcatgcctagttctaatcatctcatcctgtgtttgtgattgatgtttgcctgcctaaatgtacaaaccaccattgtgtccaaagcacagctattcatgacttaattttctaatctcaccacagagaaagtggctcatgccaaagaagaaaaccttagtatgcatcagatgctggatcagactttactggagttaaacaacatgtgaaaacctccttagctgcgaccacattctttcattttkttttgttttgttttgtttttaaacacctgcttaccccttaaatgcaatwtatttacttttaccactgtcacagaaacatccacaagataccagctaggtcagggggtggggaaaacacatacaaaaaggcaagcccatgtcagggcgatcctggttcaaatgtgccatttcccgggttgatgctgccacactttgtagagagtttagcaacacagtgtgcttagtcagygtaggaatcctcaytwaagcagragaagttyyattcaaagtgccaatgatagagtcaacaggaaggttaatgttggaaacacaatcaggtgtggattggtgctacyttgaacaaaaggtccccctgtggtcttttgttcaacattgtacaatgtagaactctgtccaacactaatttattttgtcttgagttttactacaagatgagactatggatcccgcatgcctgaattcactaaagccaagggtctgtaagccacgctgctcttcygagacttccattcctttctgattggcacacgtgcagctcatgacaatctgtaggataacaatcagtgtggatttccactctttkcagtccttcatgttaaagatttagacaccacatacaactggtaaaggacgttttcttgagagttttaactatatgtaaacattgtataatgatatggaataaaatgcacattktaggacattttctaaatttggtggtcctgtcatttgtatgttcttaatttgtgaacttttgaacgtgtgactgacctgccttcccccacaaataggttctcaaaacaatatcccacagtccaggggaaactgggtttcatgtgttaccttctcagaaacactaaaggcagcattattttggtctgttaaagttataaccaagcaggagagaccctttccaaatgttgttttcaatgttattggtgtatgcctgcacatacatgtaggactttggcagtggctttactggtttggggatttttcttcctgacatattagctaagcctctagcagtggcatagccacacaagaacaaatgatgggttaatgtgccaaatctgctgttgtcccccagcgatatgatttgactcaaactactgctttagcgagtctttatgactttctgcttcccaactcatgagttctcaattccaatacgtctccattttctcagacttggaaactaaaaatgtcatcagtcatttccctagctcttgaagactctaagcaaacaaaaatagattacagacaatactggcttcagctgtgctgcagggagaaaaaaggatgttctcaccaaaagcaaacagaatggaaacaaatgaaaactcatttggatgcagatatattttcattcaaaagtatcaaatatctctgtaactgtacttccatgtctcttaatcaggaatctcttctccacagaaagacaaaggctgtaaggcaaagaatccaagcagggtcccggagcctggttttaggtctccttccaaaaagctgtccccttgctcacggcaaataaatgcacaggtctcaaccttcctacagtttcaggacccctcgcctcacctctgccaatcctcagctaggaaaaaaccctctctgcatcactctagtcatggaagcctttcctaaacctggtcctctttcactcggggagccagatctggcttcagatccagactccacctttatgagactgcctaacctgtcaagtccctaaatctgagctgctccatctttaacatggagatgagattagcacctagctcatagtttataactgtgggagtctaatctataaccacttcaagtacacggcacagtaccaggcgcctaggtcttgttccataagttaaccgctcggccaggcatggtggctcacgcctgtaatcccaccactttgggaggctaaggcaggtggatcgcttgaggtcaggagtttgaatgagaccagcgtggccaacacagcaaaaccccgtctttactaaagttacaaaaatcagccaggcatggtggtgtgcacttaaaataccagctactcaggaggctgaggtaggagaatcgcttgaacccgggaggtggaggttgcggtaagccaagatcacacaactgcactccagcctggatgacagagtgaggctccatctcaaaaaaaaagttaactgctgtggtcctcaacttgccatttgtgctccaaagaccaccacagaagatagtacccatccttgtgaagctaaggggggactaaccttaccccaaattatgatggtttttaacactttcggatcccatttatgtgtgctaaagaacttgtactcacaagggttatttcacttaagcctcacgtcactgaggcttagatactcagttcagtagctcccaagtagtggggttgggcttcaaactctggccctgtgtgactcctgagccctgtctggaatctccttccccttgtttcaaacgctttacagcagaagaaaaacagtttctagataatagatgaaaacagatgaagccgcaggtataattaggagaggaggaggctgggaagatggaggtggagtcaaccatttagcagctgacacgaccgtgtgggagtggtttaacacctgacttcccctctgggttccagggatcagacaagatcagttaattatgaagcatcatgccaattcgaagaatgattacctaatctttcagattaatataaaaaaggagaacggctctgtctctacatggtacacgcctggggtatgactgggtgtgataacctctgaacatgccactctgtgaggtcaaggtacagagattaggactcttgaatatggaaaggccaaggctggaagctgagatggtcaccatttggagaaccatgaggtgtagagagagaattcaagattcatgttctaaattccattgctgaaacttagcagtcccagatttcagaatgaacagctgaacagttgccctgttcagagtaaaacattgtggaactccacagagaaaggacacaggtaaaaacataagcatcttcaaaaaataatgatgagagttctacagtttgttttgttgttgttgttgttgttgcttttttggtttttttttgagacagagtctcactctgttgcccaggctggagtgcagtggcatgatctcagctcactgaaacctccaccttctgggttcaagcaattctcatgccccagcctcccgagtagctgggattacaggtgcatgccaccacgcctggctaatttttgtataaaaatagagtaagaaagtactctaaaaagtagagacgaggtttcaccatgttgcccaggctgatctcgagctcctgacctcaagtgatctgcccacctcggcctcccaaagtgctgggattacaggcatgagccactgtgccggcctacaatcagttcttaagagaaaaaagaaaagcgctttgtggatacattcagaactttttgagactgacattgaaaagaacaattcccctccttattgttcctagagatgtcgttaacagaaacaaaatctaatttttgcatatgctggtttgtgtcctccagagttcaatactttgggcctgatttttctccaggaaaaaaaaattatatagatatagatatagatatctgtcttactcaagtatttgaatgtgtgtgaaccattttttcaacttgtcaacactatttgtagctggttttttttttaaatctacagtcagatatatatacagggagaaaaaaaatccgaattctccaatcaaaacaaaaagcactagggcgttcagggagccatcatttccagaattggagacaaaggtttggaaagaaaatagaaatgttgggcagtacaagaagtgttccttccattatatatactttttgacattgagggttttcagagctacattcctccaacagatgtcataaattttgtgtgtcaaacaatgaatgaaactatgttgagagttcactaatatgaatgtaacttttgccaaatttttgacaaatgggcatcaaccctgaggaaaaggctgctttctgctgcctgtgagagttttctttccatttgttaccaaagccatggagaaccaagggtcgagtcaaggccatatcaggacctgccaaggctgttgccctaaactgaaaacgctgattcagaactggaaggagccttaagatcatcgaggacagagaaaaacgagacctagaaagatttagtggtttgctccgagtcatccagcccccgtcaaggcgggcagtgcagcgtggggcctggaaaccagaggcactggttttgcatccgctccctgctcacagaccggcccaggttaatgttgccatctgggcgttgatttctccatccctgaaggaggtggtttcactgcccctctccacgtgcccactcacttcctcagggctgagaaccgaatggggcaatgtgtgtagagtccctcttctgttccttagccccaatccttttttttttcacctgcattaggtccttagggaaactgaaagtaactttttccttttgaaatgaaaatccccagtaccactgcccgggaggatattcactgcaaggccatggtaccccacaagtggcccggaaagaaagctcaagtcacagtttcgaagtttgtttttgagttgttaatcacctgcgcacaggaggcaaagaatgtttcaaagtagtagattcaaatctcacatggaagctaaaggctggctctgttgtaagtttctgttactccattctcaaactgcatttggatttgttgcttcatggaagccaacagaacactgctcttaggcctggcatcggatgtaaatgaaggcagttcagcccttatttattctagagaagccacgaggcagatcctgtggagccgtggaatccactgtctccagagggaagctaatgaccgggaaggtgaaagatgctttgtctgtggcagggaagcagttgttgtgtctccggaggggccggctgggcacaggggggccggaggagcagaagagttggctcctcttggcggatgctgcatggggatggggtcagaggggacagcacacatcatgatggtaagtcctggtctgttttcaactccagagacactcagaaaggatttggaatgctgcctttccagtgggactcttggttagactcatgactccagtgttaaactcccagatgcctgcactggtataatatagcccttcggccttctggtgagctgggattcgatgggctgcccacatcctgcacctccactcccccacctcaccccaaagtccacttcctctatgaaaaccacccttcacaatgaaacacttgccaaggaactgcttgaatcgtgctgtggtcaaggacgcctttatctgaagtgagccccatcactattcccaaaaggattaagtatagttgcccaaagcccagtgatgtaaatattagaaatgggaacccacacccaggcagtaggggcttttgtttttgaaggggatgctggcttcctaggaatggccaaagcatacctgcatctcagaagcctgagccagcgggaagtgattaacccctgggttactcagctcgaagcctgtcattcccatgatttgttttcctgctatcttcacacaaagcactcctttccagaacactccgggactgtctgcctagcaccttccggagaaattaaaaagagcaaaggcagaataatttgcctaagaataggaatgtcaagaaaatgtgcctcaacaaagagttgctaggctcaaatcctggccaaactgttcatctctcttcagttgttaaccctctacttgaaaacttcctatccgccatgcctcctttttctggctttcgttcttcccttctggctacaattttttgttactctaatctcttgttctgctcactttctctcagacacagagcttccatattgtcttctagtaactaaaattatgaaagttaagattcataattttgcctacaagacaaattgtatttccatttaagaatgttttacagtattttggggactgtattttgggctcagatgggccggaggagtagaagagtcagctcctcttggcagatgctctgtggggctgggggctgagaagccagcaaacatcatgatggcaaatcctggtctgttttcaaggttgggggttataggacaatacagacaaagtataatagacgtcttgccctcaaggagtctatggaagcaactgaatatgtgcacaaacgcactaaaaaataataaaacaggatatgattacatggcaaatagacagtaaatgatacaagactacatggaaacagatgtcatgcccccttcctggtagatttctaaccatctaaaaccagtagaaaaggctctcctgggcatgctctataattttctcaggggtactccagccacaggcaaatcaccactcaccccggcctctcaaatcttagaaacaagagctctgctagtttaaaaatgctttggttttactacttactctggctacgaaattttttgttcataattgtagcttttttctaccaaattctcattttaaaatcctcccctcttacccacctctcattccttgctgtaggccatgtagttgtgttctgtttgtttgtttgtttgtttgtttgtttttaaacttttggtcttaccatacctttgcttt

SEQ ID NO: 8794 - DNA, 28190 bp, Homo sapiens
cgataattttagaaaaaaagaggagcacattgactcaaaaaatatgttgaagctaaaatgattgttaaattgtagatgtggaaattgataaggacaaaagatgcaaggatgttgcttcgatattagcttgaataaataacaggcaaatgggaagtgaatgaggacaaacaggtctgggaaaatgatggaaacatgatgtgtccagcttcggaccatggacatgggtgcagccataatgaggggaggggtcatggctggagatagagttgcgggagtctttgttgtctctttctttttcccccacccaccactcacatccgattcacattctcatcttcctgcccatacactcagtgtattatgactaatcaacaggggaagaactgagcaataattttttctgcctcctcctcatttttctacaagtctaaataagggtgtcatgattagaaagcaacgcaaattatctggtccaaccctaagataaaatgcatgactaccacaaagttcctttagtttctccttgccatttccttcctagaaatcaagggattccccacattattttatataggatcaaatgaaatctgcctgcagggcatgcatatatgtattttagtagaaagtgtcaatctgtttctgctcttttagccacccttaataaaaaaaagatacaaaaagtcataagaagataaaacaaaaataattgacatctgaatttagaatgtatcttatttagttatttagttatttgtttgtcatctgagtacatacgtgctatggcaattaacactgaataggctacttcccctaggcctagaacactggctgagatgcactaggaacatgctagataagagagagactaaattaagacttgttaagtaatatgaataattcatttaatcataattaatccacaaggataatggagaggtgagtgatgcatggaatcaaggttatatgagtctaatattatatattaggccctccaaggaaacacaccattgtaagcccggagttttaccagtgtgtacaaggagtgaattcatgactcacagtgttctgaggctgctctggacatgcaatcttgcatgcttttgtcatgacaggtcttaagaagtttatcagctttctcaaatagctgaatgacagaacactggatttttgttcagatagcctatcaacttggcatctgtgttgcggttgtcacttggtaacaagataagtacttcgacagaggtrttacactccctaacaaagctgacttcatgtgcagactttctcacactcatagctggcccagggccacttcttaaaataggtgaggtttgttttctttgccctgtctctcgggaccttgcctcccggtggcctaagcctatgcttattcaaagccttctcattctcctatcctcgtcacacaccccgaaactccttcctggaccacccctttctctgtaaaacccgcttcacaggaatttagatacatgtaatatttctcccaaagccgttaacaaacaaagtgttgttgctaatttattctctgataaagagatttcaaaaagtgtatattggagaatgttttagccaagatgtcccaaattcacaccatggaggtgactgccttcacctccatttggttcggctcacagcaacaactacttaaatttctggaataaatcatgctatctaactactaaggctaattaatactaatgatctttgctataaattaacatagtttcaatatgtctaactggaagtcattaaaaataaggttattatatagaattttatattaaaataggactttcttttgacctacattcatatcatgtttgagataatttcagtggtgatattactgctgatacagaaatgatgcattttcctaatttgtacattccccatatatccacaaatcatgtaaaataggtaattatggaagtatcactgtttgctcttcaaagtgaagaggatagaaatgcattacaatgtgccaaacatgagtaagtcattcagcaaacactaagtgaacacctaatatgagccaaatgcctgtcctagccactggggaaaaccattatagtcttggagttcatggttgttaccatccagcagggaagataggcactgaagagtaaactacacaggttatgcaatcacagttggttagatgtttcaaagaaaaagcacagtgtatgcaagtctcagattagatattagaactttattacttataaagttattgtcttcttttggaaattatttctcctttatatatgattcattgtagtgatagtcaggagagaaaaaacacctcaatacagaaactttggtaaattatttctgattttaaaagtaatgcatgcctattatggaaaatgtgggacttttttaaggtacaaagaaagacaatggtaaatctataaagttaccacttagacataaatcctgtttatgttttgaagaaatattatgttaagtaatatttcttctgcatgtattgtatttatataattaatatcatactgtccatataattttatttcctttcatttcccccttatgattatcttgtatacattttcctagaaaataagacactttctgtttcattaatctcatattccgtaggagtgacctgctctgcaattgttgcctgtattatttcaggttatttgagaaagcttaatctgatgtattttctattggtaaggaacactctttagtgactgtgctttttttctagttgacctactggctgggtgactgctatagtctcctaatacatttctcaccctttagattctttctcttctgaattttcagatttttcttcataaaacaccactttttacaagtcacttcccttctccagagtttacagtagactgcctttagcttagatcccaactcagcctgagatcaaaggctcctctataagatctgttccttttctcctttcctcctctataagatctgttccttttctcctttcctcctctataacaccaactcggatccagacagacctcaggaagctattcgatgatctttgcttcccacttctataatattagtgccttcctctctctattgtctatttttcatttatctcagctctttgctcaagaccctaacacacattatcaatcgtttcccttctttctatgatacttactattagcaccactcaatttgggtttaagttacatattatcttttacaagtctctctagttgtttgaggtgtgaaagtctagtcttcttatactagagctcataaattgctctaatctaggcagaaaggcagctcccaaaccggacactaagagtcaccctattatatatcagctaatattatgcggcactcactaccaacgagaatctgctaaggacttggcaggcatcatctcgttgattattcacagcagcctgtattatttagaatgcttttggctgcaaatgacagagaacccatagcgtcgaatgctgcttaaacaatacagacttgtttattataatatctcagcaacagcaagaacaaaaactagaggtaggtggtttctagcactggccaatgtcagagctcttgtttgggatcgctgcaaatttctcagtcttcctatatggttgaaatatgactgtgactgtggcatcttctggcatcacatcctcgcacaaccatgctcaaagttgggtaggaagggatggtatagatatggaggttctttcttcatgctttcttctgttaaggaaagaaaaccttttgccaaacattccccagtggatttctcccaaaacgctttgtccagaattgggtttatatgtccacccatttccaacccacccccaccctgcccaacacacacacaccccctacaagactggcagctaggctttcctttcctgagatcaagggctctctgaataatacccgaagaaaattaggaagaagggtagcagaaaggcattgattggggtaggcaatcaacagtaccagctgtatagaattattagaaaattagaagttagagtagttgagaaatacgtgcaagattatacaactagtaaatggcaaaaagaagattctgagtctgagacttttctgagtctctcagtattcatatccttgttcaccacagtatagggcctctctagagagttttagcatgttactccacccattaaaaatatttggtaagaatttgcttgatgctcaccactgttcttgctgctcaagggaaaccaagtatatatttgtggatagatcctaactcagatgatactgtcagaatatataagattcctataccacatcctgaactctgaaagttgcagttctacgtagaagttcactgagggttgtaagagtcagaatggactccatggaagttatggggtgtgaatcaaacctcacaggtgagtcagtggggagaaagaagcatgacattcctcttgagaataactggaatgaaaataatacggtgagaaagagtagcacctgaaaagtgagtgaaggaaagggtggtggaagttctaggtacattgatatctgtcccaacttgttgagctgtcaatgtgtggttaaaaaacagttaaacaggccaggcccggtggctcacacctgtaatcccagcactttgggaggccgaggtgggcggattgcctgaggtcaggagtttgagaccagcctggccaacatggtgaaaccccgtctctactaaaaataccaaaaattagccagtcgtagtggtgggcacctgtaatcccagctattcaggaggctgaggcaggaggatcacttgaacccaagaggcgggagttgcagtgagcagagatcacgccattgcaccccagcctgggcaacaagagtgaaactcgatctcaaaaaaacaaaaacaaaaacaaaaaacagttaaacagatggttggtcacatagacattaccagaggggtcttcttggacagaggctgaaaagaaagaagggacttagctcaccaccagactcctcagcactcacgggagaagagcactaaggacaaaggggcacttaacacgtgtaaaagggcaatggctcctaataaaggataagatctgttttctttttattttattttttgtttttgagatggagtctcactctgtcacccaggctggagtgcagtggcacagtctcagctcaatgcaacctccacctcccaggttcaagtgattcttctgcctcagcctctcaagtagctggaactggagatgtgtgccaccacgtgcagctaatttttgtatttttagtagtgacagggtttcaccatgctggccaggctggtctcaaactcctgacctcaagtgatcctcccgcctcggcctcccaaagtgctgggattacatgcatgagccaccacacccggccataagatctattttataatcaagagaagatgaaaaattcttcttgtgtcaggatattagggtagaatccgagttatttcgaaaattacagcttgagacaatgtaagacagattaaaatagagaatttctaagacagaaaatggattttttcttccctcccatgccctaagcatcgcttgggtctccctaggctcaaaagagagagtaaatctcattatatttatatattggaagaagcccacaggccatggttgtccaaagctagaagaagtattgtagaatttgatactatccttgagcacaagtatagtgggggaaatcttgaaactggggctgacagattttagctaactttcacaggcatgtgtagatattgacaaattcttaagtttcagagtgacctcatcctcccccaaaatttcttaaaccatgcctttacaaacaagtatttctattctaatgatgtcttcctgagtaaaatgttgaatcactcaaargacacagatcaaaagacagagggagaaaaaaaaatgccatgtgggaggggcaaagctgtataaaaccagtcattaccatgtctgaactgtaacaactctcagaggagcattgcccrtcagacagcaactcagagaataaccagagaacaaccaggtatttcaatgatttccatgccatgtctatgggaaatagggtttcatgttttctcttccctcatgctggtattaatagattgaaaatttggatgtggggtgtttgtagagggcgagtaaaatttaagtggtgttttcttgtttagttgttgaattgaaaatattttatttcaagatttgaattaaatttataaggtttaattttgaatctcagaagccaacaaatacctttgtagcattaaccaaaacaaaatgtacattcagattgtgatgccaattttattgaacagrttagattatatatgttctctactagctactgttttgacactaaatttgatggaaacaactagatacattaaaatattttcatttaagcaattgaatgtaatctctacattgtatataaataataggaaaagaagacttcatttgcaccttaaatgaaaaagcaggaactgcaaaaattaagtagcaatttgggctgggtcaatctagtacaacaatatgtttattgagtttagttcaataatgggtcaatttagtgaaagagaataatcagccaaagtagttgcagggttgactgaagtatggttcagtaaataacttaatatcccataaaaagatacttattcattatgaaagccatcaactaggagaaattgcttttaattctgttgggggagatgtagcagtatttgatgagatattcccttgaaactgttgttttctcttagttctcattaatttttgtggtcaatttcaaaatatttccactgtctaattgtaaacaaaatttgttttaaatgctacagcaaactccaatctaacatccagggccaacagggtgagagacaatggccgtgtgcctggtgactcctcccaaattcttccttccctgtgccaagtttcagtggtgcatttgtcaacttgtgttgcaggaaccaacacacacaccaccaggaagcccaaccctgcatattactcccattaattcatcccagtaatactattaaaccttaattaagagcatactatttggaagttaatgagatcatataaattactataatgttaaaaaattcacaacaggtatacctgttccaggaggctgtggtatttcacaataccccatgacttcaattttgccttgttttgaaagattttcattcaaacataaagtatggccttatctgagagtcaggaaacactgcatatgggtgccttcatagatttctaaaattatgaaactctcagaccttatttgaaaagtttgtaggaaagcattagacttggaatcagaagtctgtgatccagtctaggcttctgaaatggaccagctgtgcaatctctattttcatattttcattcatattacagaaattactaagccttactggacaggtaattatgcaaattgaaaagggagctgaaggaatttggtgactgccatacagacatcaaatattatttttacattaaatgtaattaattacaccttatttaaaaatataattgaaactatcttttttgaaagaagtaaatgcatccaggaaaatttgcttctgttcttattaatttttttctttatcaagttaccttaaattctaacttagtattaacagaactttctgttagtttgtctttagagttaaatatttttactatcaaagttactatgtggattgttacaaagaatccggtatgaattgttacaaagaatcacgtatttaggtatgggaraagtctaaatttatgtttgtggctctgatctcttatttacatttctcacatggggatcgagaaatattttatttgtgttattaatactcagtttgtttccaaaagatattgagataattaattttaaaaatctgtacaataaatctatttaattatgaagacaattttaagaggaagaggaacaaatttttgagccatccaatgtaatctagtatctatgatgaagcaagagaaaaaaaaaagtgactttttgtttttacttcctaataagccttctagtagrattacaggtttactacttttttcttttgacttcctctttctagcatttcttgcactacaacttgcttaagctcttacacttcatagtgaagctatgcaccaccgagtgaagcgatgtggaacattggaaagagtgggcttccttagacagacctgggcttgaatccctgctccactacctaccagctgtgtgaccttatacaagttacttaatgtttctgagcatcaggatataatctataaaatagggagaatcacctctacctcatacagattctgcaaagattaaacgaggagaggaggtgagagagttttagggatacgttttatttaatttactatttttgtcttgataaaatagtctggttgtattccaaatgagacattttaatacaaataaattccaatcactttcttaaaaaaaaagagttcatgaatcaagggttcacgcaagaaagaagcgaccaatggtccttgttggagagcaatgctgtgtgagaccacaggtgtacacagccaagaccagagccagaggacatgcttcctcctgggtacttccagcccctccccagttcggggaaggcactgtcataagaaggtttcctgagggatgatcagtatcagcattgtttggtatatttayatattttgataattatcgggtatgttgcaagctatgatgaaagcaaaacatacagctggaaagacgatcattggtcaggaccaaaaaacacacacaccttgggtgtgagcatgcattcagttgcctgcagagcctgaggtcagggaaggtctcagatggttcataccttggtgtatacatgagtttcataggcctgggattaaggattatccctgcaatcttgcctggcattgactttctacctggtggggtggcagaagaagggggtcttctagtcctcccagtaatgaacaccccagtataggaagtcttttttagtaaggctgtggtatgtgtggtgcatatagggaaggggttctgggataggggctgggtgaaactccaaaccttcaaacaatgagtcaaagtcactttagaagyaggaaagcagaaagaagattgaccgtcttaccagatgcaacaaggtatgtatgcaggtggcatatatttcaatatgtgtatatcttcctgtgtggcagtgtgtgtggtgtggatgtgtgcgttgtgcttgtgggggcagcatagaagttgagagcatgatcctagggtctgcctatctggcttcaattcctactcctgtccctatatattgtcattgttattctatggaatgccacaaagtgtcgctgctcatcatacaaaacacttcatgtatctcaggactggctatgtaatttacagcgtctggtgcacaatgaaaatgtgggccttttgtttaaaattatcaagaatttcaagatggcgataggagggcatttggctaaacaaggggctttttacggctgcacaggtggtatgtccatgaagctgtccctgacctgcctcatgttgttccatgaggaagaacagacagggaatctgtccctacacagaatgcagcctgtcctactgttgctgacctcacccaaaatgttaccttatgtttcagagctgtttttttcttcctstctttgcttctagattgaaacaatggaggatctttgtgtggcaaacacactctttgccctcaatttattcaagcatctggcaaaagcaagccccacccagaacctcttcctctccccatggagcatctcgtccaccatggccatggtctacatgggctccaggggcagcaccgaagaccagatggccaaggtgagtttgagctgaagctccacatttgggcygmgkagttcctgaatggaattggagaactgctcttgttttatgctaaagacattttaactcaggaggtcagcaatcatcacaggtaatgaagcactgatccttacaacacaaattccttagattcaaatctataagacagccaagccccmgaatccctcaactgtagctgttgaaggcatatgggagttgaatagcctgcaaggctggavacagttatgagtgaccacatcttatattttaataatataatattctyatttttcaaagttagtgttttgtacccattatctcattcagttttaagacagatatcattttacagatgagagccctggtggtgtcagagaagcccccactgtctcctaactcctagcctgggctccttcccattactgtgccactgtggtgtttgttccctattcctatgaagaattccttctaataatgttaagagagtatcacaaagggaaaaaaaaaaaaacataccagggtggtgctcactatacccacaggatgcatggatagtgttgtagctgcaraaratcatgcctgtgaggtcacggtagcaraatgagacctggcattattatggccagccctgaaaaccaaggtagatgggatgcacaacatcattgtgagggatttctgcaaggccactgcctgccttccttggtgaatggacgtggactcagtcaggaaactctttccacggagtctgggcccttgaaattatgccggactacttcaattatacactgcaatcgttactgtaatagtcactcagcacatacaaaattcttgtgatcatgttacttccaaggttagtgacctcgatgtggccatgatatcattaaaattcctttgcattcacacatacaaacattaacattaaatgctttaaggacacgcatgcattgtgcatgcagtcacaccaagatgccgccggctggtttccagtttcccacgagaatgtacctgagtgtaaatacattctttccatgcacatggtgacccatgtaaggtgggcctcatttgaagtttgaagtttcacagagagagcattggccaatattgctgcaggaagacaagggatgggtgaatcaatctctgtgtttgtgacagtttaaacattgagacttacaacaaaactcaattgctcaactccctgacacaagtagtcttttgcaatattctttccccattattttttattttttgccttgaaagaataaagatagtaaattggcacaaaagctttagaaacatcaggtcttaggtttttttcttttttcctttcttttttttgagatggagtctcgccctatcacccaggctggagtgcagtggtgcgatcttggctcactacaacctccaactcccaggttcaagccattctcctgcctcagcctcccgagtagctgggattacaggcgcctgccacgatgcccatctaatttttgtattagtagagatggggtttcaccattttggccaggctggtctcaaactcctgaccttgtgatccacctgcctcggcctcccaaagtgctgggattataggcgtgagccagtgcacccggcctaggtttttttgttttttaaatgtaaaggaatcagtagcaatatattttgggagcaaatgctaaatgaagtgctctgggttgttaaagtaaaaatcttgattttggtactagaggaaaataaactgattgctctggacacaagacagcttttctgtgtctaagaagtgctttaagcctttgggactatgcgaggattctatatagtctttttttttttgagactctatatatatcgtcttttgacaactctgttgcatgtgtagattttgaaattcaaatgttaatatgattgcttcccagataaaaagaaaaagacatttattggctggagaaagcagcacagactttggggacagacgtatctgtgtttgagtcatggctttgttccttactacatgtgtgtgaggacattgaaaccatttgcatctcagttttctcatctacaaaatgggaataaaaatgtgtagcatgcaagaaagttgtgaagattagaggtactatgtaaggcacttagtagcagttgctataataacaaccaatacttattagtgccttagccaggcatctttctaagaacttcttataaatttactcacataagacaaaatattatgaggtaggtacgatgattaccgtactcattttacagatgagggaatcagggcaagaagaggccacacagttgagaattgctgtagctgttagaagtggtacatttgtagtgaaagaaaagaatacataaaagatataagctcctggatggcataggtctgtgggaattaggatataagctcttttccttacagtgaggcaacagacccatccaggccaaactgcctcactattttctctgtggcctttgtgtggactaggggcagctcacagtcccacttttgcagggacatctccctgagtgactttaacactgattcaggaaggctttagtgctagcccaaagaaccctgatttaagggtcaatttccttggaagagaggaaaaccagccaagctgtcgtaggaaatcttcttcttttacgtgagggtggagttgcaccacttmttttcagagagtactaggcaggacttacgatgtatgactcaaagagcagaaaaagacctcacaaaccctaacacctctccttctagcccagaaattcaccaacttgctggacaaggctgccttaattaacttcattagcagaaccccaaccatcaagccacttaccagatcagcttctcctcagggaccccatagggaggtgctgcaggaccaagggttcccaaggaggtgggatggggtgggtggctgggaggcagggccagcttgcaggtattaagactggcagaccaaggcgggcaggcagcagtgttgtgggaaggggatctgaggaagcttcagaggggacagtccttgctgccagcttccccgtgtcagccaaaactgcctacttactatacgaagagattcacagtgtcatcagaccaacttgtccctcacatggacataaatttctctgtgtatgaatatggtatgtgtaaatattttaggtgaaccctgttaatattgcatgacctgttttatgccttagctgactctggcttgtagtttttgacagattgaaagtattttgtgtataaggccactgaaaagagagagacacacaaggttctgagttaatcttgtgactttctttaaaatactggcatttttttttcaagaccatttattggttggatataatttagataatttggggaagaggttttaaatyatttcataataacaatttgttttccaaaatggccaggatataaattaatctaaaacacctcatgctgttttctataagggaaatttaggttggctgatacttttatattacacagaaagagtattgagtatctatggytgttccccatgtataagggmagggaaaagatctaggaccattttagagccacctgatagccatctgttttaaaagttcagtaaatccgtgggcaagtgtaaccgttttctctaattctgattgcaggtgcttcagtttaatgaagtgggagccaatgcagttacccccatgactccagagaactttaccagctgtgggttcatgcagcagatccagaagggtagttatcctgatgcvattttgcaggtatctgacttactggtccaaatttcttttgtggtttatttttgcaatcttcctgtcttaaagccacagtgtyagactgggaaggaagcgaatataccctcccccattcacagaaagaaaactaagactcagagtcattaagaaaaacatgtcctaagatgatacccataaygagagacragccaggacagaatccagacttcatgagttttaggccaagcctatttacttctaaattctctcatgcctctctgtcattggtgaggtatgtgtaatttatcataaatccacagtagagactcctagaatacacgtgtatggataaggatttccagaggagagagggtagggactgacaattgattgagaaatggcagaaggctgggcccaatgattgcatgagaaatcactgaccttcaggtawctttccttctatctatctaatctatcatctatcrttgatctctctcatctatcttacctatcatacatctatcaatcctatctatctatatattttatgaatcatctatttatcatctatcttctctgtcatctgtctatcttatctattwatcaatcagctatctcggggagtaacacctttcctcagtactccatttccttaaatgtcagctatccagttaaattataaaaactgagtatagactgctcctgttggcaaccaacttccacagtcatgcttatgaggtagattatgaagaggtatctcccaaagctctcttcctgggcactctgaagctccttctacccattgcccagggaattatgggctagaggaggtggacaggatcctgatcatgtggagattccgccaggtgttctgyggtacctggcagtccatcaggagggctctgtcccctgccctaggacaggctgctgctgtgaccaagccctgtgtctgacatggtgcttacaaacttcagtttgagaactgaaataaccattcacttttgtggttttctaaaacccatgttttccactgcatagtttgccccataaaataggtatctagagaagctatatgaactttgtaagatcattactaaggcaacatttcctccctgycarctttactgaggtataatggacaaataaaaattgtacatgttcaagatgtacagtgtgatgacttgctatacctatacattgtgaaatgattacagtcaaattaatgagcacatccatcactacaattaccyaccatttgtatgtatgtgtgtatgtatagtgaggacacttaaaaaatatattcttcacaaatttcaagtaaacagttttattaactataactattaatgaacacaatcttattaactatagtcattatactgtacattagatccccagaacttatccatcttataaatayaacaaaaattccttagagactttgaagtttaggaaactgagaaggggcctttcttctaggctgttggtcacctggttaaatccaatccatagacasagcaaaaytggaaagaaattaaaattcaccttattagttttaatgtacyacatccttatcgaaatgattttctcaaagattcctctaatgtaccaaaaataaagtatgtattaatatagcatttcatgattgtattcaaaaactattaccatggcttaagaactatcttgtttagtagttctgtgttatatataaagaattccttctttcttttcaaggcacaagctgcagataaaatccattcatccttccgctctctcagctctgcaatcaatgcatccacagggrattatttactggaaagtgtcaataagctgtttggtgagaagtctgcgagcttccgggaagtaagtgaaacctgtaattgaaatggctggatcccaaacaagtaatgaagtcactttcaragcagttctctacaattcwacagttcataaaagcagagttggaattccacaccagctccctagggctggccttgcrtaacagctgcccttcctgtaycctctggggcttcctcctcttcccattgcaaatgtcccaatctcagagtcataaatcaggaaaacaaatgcaactgttttccagagacactatcccccaagtcaaacctctttccttttattctgtctctataatgcaaggagtacaagagggtggatagagttggggwgtaagcgtggacaaaggggtctgcactctttcccccttcagcacctgccttccatagccaacctccactcccaccctaccccaggtctcctaatttcaatgggaagaccataattcaccattatgccatggcttgtttggtatgtattttatgtagcctttgtcattttcttgctttaaaggaatatattcgactctgtcagaaatattactcctcagaaccccaggcagtagayttcctagaatgtgcagaagaagctagaaaaaarattaattcctgggtsaagactcaaaccaaaggtaaatccaagaaaatattttatttacttctttccagttagaaaactctgatctatcttkttccatccatgaacttagttagccctcacccctttacaatttgtccaactgcagttactttggtggatgygaatttattcctgattagctcagtggtgttttaactgagaagaaataattgaggcctactaatagaagacatatgtttagtacttaaatatttgattttggatattgcttgaggatagaatatgaaaggaggcagaagctttcaaaataggaaatatcagcattgaaataattgtgagtctatgcccactgtggacaaaaagaaaacaaggcttgaccctgagcttagtaaatggtgtgagctataaagaatacaggcagtggaggagggaagaatcataaaattattttcactctttcttctctttcaccattcaaagccaatccattgtcaagtttttttggtctctgcttcatccctccttgattatctaagtcacgtctaccattttaactcatgcttttaattgtttcacaggctcctgcctccctctgtatattttacaatgaataaattatttaattgaatcatttattcattgtaatttagtttattaagtcatttattcattraattcattcattcattaagttcwattaasttcattcacttagtcaacaaatatttatccaccacacaccatattccagaaactatatgtggagataaagataaaaatggtaaatcctgccaccatagagcctatagaggagggattcagtcatgttggcaattgctatagagtagtagtcagtgctttcattgagaagtacaggygytatgtgggagtacacaggaaaggcatctgactggatttaaaaatgattaaattgtaattgggaagacaggctggagctggccaggtggagggtgcatgcctggggggagatttccagacagagtgcacagaatatgcaaaggtccagaggtaaccctaaggagaagaatagagtctggtctgactgcagtgtggagggccaagggaaggaggtgaaattaaagaggtgatgcagtacacttattatgctattcccacactaaaaactgtcagtgacctcctactgtcctcaggagaaggtctcattctttaccttgacttctgagttctcagtaatccagttgactgtgcttggctaccactggcccttggagctccttaaacactcattgctgcctctagactttgtttctgaggatgcctcaactacaggatttaagttgcagtttaaattgcagccaaagtcttactctttcctggaagtgactcccaattacttcctgatcttttcttcttctcatctcctcatctgctttttcagcttcacaagtcacattagtgttagccatatatggccttaaacaattatggaactgatttttgttagtttgttttgcttttcctctcaggctctaattatttttgggtaggtccagtatgtcacacttatcctatgcccccacaaaaatttgcacagttttttgctgacagtgaaaatccttcattcttctgaatttccrggtagagttgtaggccttaagtaaacaattgctgaataataacatataaatgtatttctaagaaayagagatgattatgaattcagaattgtgtaagtatttcattcatttatgatctgttaggattgaaaatgtcctaagagagctcctatccatcttaccaatttgtggttggagcatcctgttcccaggggattagccggctcccctaagatcccactggtagcggtaaagccagggttgcttcttcttctgatccttagtctaactccagaattcctcaatcggatgtttaaaaattttataacttatttttttaaggattttcatttaactcttatgtttaagacattgtttcaagaaatagtttggtgtcttgctttattaattaccacaatggaaaatgcacataaactaagtkctatgggatttcaaaaaatatatatttatttgtttatctgaaaataattgatttccttttagttcttcattttcattgtggatttgtgaaatactgttctaaaatattgacagaccactgacacaaaggaagcagagaaagatgatttaaatcaaaagttcaagtaaaaatggagagcaaaattaaagagacacatggaagttttgccttctttaaagaatggcatgaattgtttttctctttagacattgtgctaaatggctgtaagtcaatcagttattttgccaaaatgccaagcagctattttggcagattgttttaccagcttttgtaagaattggagagaattgtctgtttcatcatgctatgatcraatactagttttatcatatayatcacaacattactataccccaatactaaccaaaaattttaatarcttgggaaatatattgaatgtatatattaaatgaatacattgaagatgaaactgatgcaaggcaggcaagctccaaagtggggcttagccttcaagggttcttggcttcacccaggaaagtattcaaggrtgagctggaggtagggtagaagaaaacagctttattgaagtggcagtattacagctccatgattcctcctgcagagaagggctaccccaggcactgtgctgagaggcacagctcagggcagtttkggggtcatatttatacctacttttaattacatgtagattaaggggcagtttacgcagaaatttctagggaacggggaataacttttgggtcatcaggtcattgccacagaaagaggtggtaactccaaggtgttgccatcacaatggtaaactgacatggtacactgcttccatcctgtccctggtccccrttttagctagccctcaatttggcctggtgtctaaaacctgcctccagagtcaggtcccacctcctacttcaaaaccacattgacctattaatttgttaagagtcttgtatttgtcagtagttttgactgtggaggcagaatttttacaagcttaccagcattgtaacgttgggaagactgctaacctggtggtgtccttttgcataaaatgacactaataaaacccacctaatagagtatcaaaataatatattttgatgcttggaatactgcagagcgagtactaactataaacaaactgcttcttaaaccaatttcatttttttaaatgaccacactcatttgtcattgtttctgtcaatcttctcgggcttactccttcactcccttctctgtatgatcatagtactcaatatattatttagctcaattacagaagttatcacacagggtttcacaactgattttgaatgtctcccccagtgttctaggctcatccaggataattcttcctttctcatctcttgtatctgcactactcttaatttaggtctagtatattttttacaaaacgtttttgaataaatgagtaagtcagatcctcagactatctagaccagatctagcagtacatgatatattttggaaaggcactattatattccctaagaacctctctttcacttccctctgatttgaataactttcaactgccaagctttgagaaaagaatataaaagggagtgaaaatctccattccaaacttgataggcggtctaaattttaaatgcattatttcttcattttttcttggattttgcaagcttttgggaaatttgtttcaattttaattttgctttaaataaacctaaaaaactttagcttgaagatkaacawctctgcaatttgaagaatttagtttgatggctactcagaagattcagtaagtaatttcacagttcttgattatgaaacctaaatatatgttatgttttctrtaggcaaaatcccaaacttgttacctgaaggttctgtagatggggataccaggatggtcctggtgaatgctgtctacttcaaaggaaagtggaaaactccatttgagaagaaactaaatgggctttatcctttccgtgtaaactcggtatgagacaacaaaatacatcttcctagcatatattttagggcttttgacaagatatagacagaaaaattagagaccgctcattatagacttgctagttagaagttatgcatgttggacagttgattgactctttagaaacagtataggtaaaggggaagactgtggctttttaattatacatgcccagactccaacgttggctctaccacttatttcaaagggctgtaaatattgagacatggcacggttcctggcccatagtamgaactaaacaagtgttttagaattatggttgtcattaccattgttgtccatcttactaaataatgggtataaagttgaayaagctaataacatcagagtacccactgtaaggatgtacaaataatttattttgttgatttaaaaaaatcacatttatccwacactaaagtagaaccaatcctcctttatgtctaattgtaaatctcttgatatcttataatcgacttccatattttaccttttaataatattaggctcagcrcacacctgtacagatgatgtacttgcgtgaaaagctaaacattggatacatagaagacctaaaggctcagattctagaactcccatatgctggagatgttagcatgttcttgttgcttccagatgaaattgccgatgtgtccactggcttggagctggtaagacattcagatatttaagtttctggggctatacctacctttcgtgagatgagatgaatatatactccttacaaatggtgtggtaatttctcatggaaatatatgaaacagttgatagtaaatatggcatgcctctacatttcattcaaagccttaactatgtcatacgtgttaccttcttgtaaaaatctgaccaatctgttaactttctatatcacccacaatatagtaaagtcactgatttttaatattagacttaaagttgttttccttctttctaatacttgctgtattttcttttgtttgttttgttttgttttgctttgcagctggaaagtgaaataacctatgacaaactcaacaagtggaccagcaaagacaaaatggctgaagatgaagttgaggtatacataccccagttcaaattagaagagcattatgaactcagatccattctgagaagcatgggcatggaggacgccttcaacaagggacgggccaatttctcagggatgtcggagaggaatgacctgtttctttctgaagtgttccaccaagccatggtggatgtgaatgaggagggcactgaagcagccgctggcacagsaggtgttatgacagggagaactggacatggaggcccacagtttgtggcagatcatccktttctttttcttattatgcataagataaccaastgcattttatttttcggcagattttsctcaccctaaaactaagcgtgytgcttctgcaaaagatttttgtagatgagctgtgtgcctcagaattgctatttcaaattgccaaaaatttagagatgttttctacatatttctgctcttctgaacaacttctgctacccactaaataaaaacacagaaataattagacaattgtctattataacatgacaaccctattaatcatttggtcttctaaaatgggatcatgcccatttagattttccttactatcagtttatttttataacattaacttttactttgttatttattattttatataatggtgagtttttaaattattgctcactgcctatttaatgtagctaataaagttatagaagcagatgatctgttaatttcctatctaataaatgcctttaattgttctcataatgaagaataagtaggtatccctccatgcccttctrtaataaatatctggaaaaaacattaaacaataggcaaatatatgttatgtgcatttctagaaatacataacacatatatatgtctgtatcttatattcaattgcaagtatataataaataaacctgcttccaaacaacaatacatttgttgtcatttcattaggtctgcagatcatagaccttgactcctaggagttgagcattatgactcacttgtgagaactcagaaaaaatagacaggatgaaggagccaaggacataacaaccttcattcaaaaagacccaatgttgagggtcagtgggatggggttgtatgaaaaatgggttagagctgctttctcacagcagcaaagacatagcaattcagaatagtctaggttagagtcctttggggaaaccactgtctaaacattaaggacaccaggattaatgaccaagtccagtggtccagacacagaagaaggcctcagtcattgagctcagagttgcaagcagtgaagatgggagatgggttgggtgcaagagcaggaggggaaacataagatggctctttctaagtgtgtttgtttctaatagcagtaatgcttttgaatgagtcagaggcagaggagaacataattgaagacctgagaaataaggcaaattgtaggttgggggcctgaacaacagagtctggctgcagaagtgcggctggatcctggaaatgcagcacactccctttgatggcaggcagggatgcttgatgcactagaacatggtagctaaaaaagtggcctcaagacttagactctctgcctccaaatcccagttgtaacacttacaagtagcttcaacacaggccaaccatggtgcttctttgtgcttcagttttctctcagtgaaaactaaagaaaaaactgtttttatcatattgctataatgactaaatgagttcatatatatccagcaattaaaagaatacttggcatatataatatttaataaatattagtgattatgatctatcttatctttgtcagtaataaaactgtctcactctaagctggtcaaacacgaatcccagaaaattactcagttaactttttaaggcttgaataatggtgtatttcttctaatcagacattcctgaaaattaagagttgctgtttcttgcattcttctacttacttttaatttcatttctctatgtgctttaataactctgcaaggtggtaggtggtaactttgtgaattatcatgagtcttaaaatatccatatttcactctcattattgagttagagtatagatatacaattctgggttccaagtgcttttcagcactttgagggtatgattttattgtctttttggtacccaaaattgttgataggaaagttgatgttaagataattcttgccccttataattttcatttttttgtttttgatttttttgatatttcattacattaaggatattttttaaatcatattttaaaaagcttatcctgttcagcagaagaattttctatctggaaacttatatctcatttcagttctgggaaacctcagccctcactatgggctcaatatatcttcccaaaattaatatgttgaaactttaatcccaagtgtgatggtacttggaggtggttcctttggaagataattagggttagatgaggtcatgagggcagaatccatgatggaattactgccctcataaggagctctaggcaccagatctttttctatctgtcatgtgaggatataacaagaaagcagtcatctgtgaatcaggaagaggccctcactagaacctaaccatgtggaaacacccctctcagattaccagtctccagaaccatgagaaatacatgtttgtagtttatgccacacaatctatggtattctgtcatagcaacctgaaccgactaagacagcaattatctactcaattgcttggcgccagttgatctactctcttcttctggattcctactaagataatattgatgcatctgatgctcctctctctgtttccaaattttttgagtacctaataaattcacatggcccaaacatcaaatatcataaaaaagactagagtgaaaagtcttccttccactcctgttccctattcatttagctcctatttctctgtctttactagtaatatatgtgcatattgcagtatacacacagggtcataaataaaaacaacaaacaaacaaaattgttctaataatactgtattattaactttgtacatgattacccctttctctttcctagtcccccaacaggcaacaaaataatgtacagctatgattttactattgtaggcagtatacctatacgtagggtgatatagtttggatatttgtccctgaccaaatctcatgttgaactgtaatccccaatactggaagtagggcttggtgggaggtgtttggatcctagaggctgatcccttatggcttggtgctgccttcatgatagtgagttctcatgagatctggtcacttaaaggtgtgtggcaactcccccaaccctctctctctcttgttcctgcttctatcatatggtatgcctgcccccccctttgccttctgccatgattataagcttcctgaggcctccccagaagctgagcagatgccatcactatgcttcctatacagcctgcagaactgtgagccagttaaacctcttttctttacaaattacccagtcttgggcatttccttacagcaatgcaagaatggcctaatacatagggggtttaatcaagaagtgaggaagaaatctggagaaggttttgagggaaaaaatgaataaaacttaatctttgactttagggaagatgaaaccatttgttgcataaatccgcaaaatctacattgatgcctttactataacataagcaacacaagcaagttttcatgctgggtggtgttgcagcccaagtcactgtggtggactgctgtcagtcaaggcgagcagtccttctatctggaggctccatatgatgctttttctaatagcagtcctggaggcatccttggataatcatatctgctcagtgcaaagttgggcaggcatcatggaactttctagcacacatctcattccctagtgaaatccagagtaccactttgctctgggttccatatcaacattcaaatattaaagtctgagccatcttgccagaaaataagtatgcctctgtgaagagaaaaacaggaactacgtgagaaaaatatataaaatagtttataaatagagaggctccttctttgtcttaatccctcctggagatgtcttcctgttccaatccctctccccatgaccctccccgccttcctccatacacatgcaaatgaaacaaatggcctgttatttttcttttgtaataaataaggagtgaaaaagcattccttgggaaaaataaaagagaaccagaaaatgatgaactaacatccgacccaataatggtgtctaaaattttgatccaaaacccttgtccctgctagtggggaaaacagacatcccagtcattcaagtgatgctctgggttctacaccaatgctctaaatgagaacagaaaatcttccggggtgcctttcacatagtatctgagagccatttttaacaggcttacaataaaggccaggcatgatgggttgtgcctgaaatcccagcactttgagaggccagaggtgggaggatcacttgagcccaggagctagaagctgctgggaaatattattgcaccactgcccttcagtctgggtgacagagtgagaccctatttctagaaaaaacaaaacagacacaacacaaattaataattcagtaatattttcagtttcattgatcattattattccactaatttgaagctttctatttgtgttttataaaaaaaatactacctgggaaaaccatgccaaatattctctgttggcagactagagaaaggattaagcaaaaaaaggatgagttacaatttgtcagaatccaggtctctcatgtgtacagagatggaaaatgtgagtaactaaacaactcaggcaaacccttaactgtctctttctgtctttttattgagacttctgacaaaaataagcctgaaagaaagagtatacatgcttktgaaactgaatcaaagggtggagctaagaacagggaggtgctaaaattttttttttttttttaatttcttcagttgaaagtttctcaactcttcagccacaatctcttactrcaggagcaaattgccaattctgctccagtgggagaaaacaaggtattgtaaatatttctttggttaatgattttatttatgtttttcttcttggttgaagtgcccagctaggtaacaaataatgaagaccccttcccccaaaaaagtccagaaataatagataaggcccaatcccttaagaatttgtctgtataagtcagagagtaacctgagctggtttgaagtttgtactagaaaaagggatatgggagaaagaacattcattcccaaaaaaagttagagaaattgtttttctaggaattgtggagtggaatttgctccttgttttactgggaattgtgaaatcatcagtggagtttcctccagtcacatttatgtatctgtcaacataggcagagataaataaaatattctctcaggacggttgagccaaaacccttcaactctttaggaaatgtgagcttggcaccctgaatttggatcctattcattaatatatggaattcatggtttgactctttaactgttacccccacaaacccaaaaccccactctcctctcctggccaccatttcatgggccattagctttcttctcttctgtggaataataaatgttcctaatcccccacatcatactaggtgctcttcataaaccaccccaaactattacctgtttctaaaaaaggccttaggtgaatagagaggtgctggggattggggaagctgtcattctctgatatgcacaactccatgaggaggtaatattatcagtatcatcagaaaggcaagaggcccttgggagtgtctcatggaaaacgggacaagaatcctccccactctccagatcttctttctcctcctgatggttctccatcatgtaatctctctctttagccactaaaatcttaaacacaatgagatacaatggcaagagcaactgtattcacagtcaagataacacagttgcagttttgactctgctgtgcatcctttgctcaatcaacctctctcagcttcagtttcttagcagacaaaatgggggagctgggttagggagattctaagggtctttccaacactgatgtgctaggggcatgcgatgatgaaatgtctatgatgagacattttgatgaatgacactatccttttcttgctttcttaattctctttggcttctcctctgagcctgtctacaggttaagctcatagatgatcagtttatagctcttgaaaactgcaaaagagcaattaattttgaaaataacctggtagacttctgacctacacatttgcagtcttctctgaaaatataattgtccaacatttgtatggaataattatttcctgtaaaatttcacctcacaattctacacccttcagaaagtatttttcattgttgggttaaatatcactaatggatggcttagtacttcattagatttctttaaaaaaagaaaataaagaattgtttctcttgtatgttctgggtaacatctgatatacaaataatgatattaataagggaattaatgaagatgagtacaactaaatattaagcttacatgagaaattagcttttataatagagaattattgttttcaggaacatgttacaagtaaataaacactggaataaccatacactgaggtagaaaaaccccagcctctgaaatggtactttctccccatttcatgaagagtgtggtttggccaaaaaccaaacattttccgtgtaaatttaattcatgagttttaaaaatacaaagcttgatatatactgtatgcaggtaacaaaatgttatttgaatgagtaagagccttaaaggaaatacagagttattttgaagatggcatttgatctgttgaggaagaaagtcacaggcaaatattcaa

SEQ ID NO: 8795 - DNA, 31657 bp, Homo sapiens
ccacgggcagtgaaaactctctcacacaccaatcaaatgacacagactccagtcatgaccctcaagaggagaaagcagtgagtgggaaaggtaatcgaactgtgggttcccgccacgttcagaatggcttggactcaagtgtaaatgtacagggttcagttttgtaatattttttcagcaaatttttatacagtgtcatttaatttgggagaggatactgtccagaaaattaatgcatacttttgtcacaatttgcctttttgtgggtgtacgttttggtttttttttgttgttttttttctttgttttttttttcttttctttttttttttttttttttttttttgcttcaatacttctgccgctttggaaattgtaacagttaattactttgaatgttgctaaaaggacattttgtgtagggtcaagttatttttatatgagttaatgtgaaattgtaaatggaaatttttccttaaaatacaacacaatgatgtctgtataaatctgtctgtttagaatctgtgctgtgtaagggcattcgtactcatgctgttactgtacttatgcaccattcagacttgttagagtagatgtgggtttatgactgccaagtttgcccagtacagtagttttttatcactaaaagttggactcattgatggagtcctgtagtagtttcagtgttagatacagttttttccaccatacatctgtgcattttctctttaggtgactgtttaagaaatttgtgtgcatagttactcagtttttatgaactgttgtatcctgttaatgcatattgctctgtgactccagtatatcttacctgtactgaccaaacctaaataaagatttttattgtaactccttaattagcttttttgttttgttttgggtgtatgtttagcatttgtcattttcattgagtcattgaatttctactcattatccttcaagtaccacaacagtcaaacttaagaccaagcatcgattacgattttgcacacaatttttaatttatgccttattttgcaaaacggagctggagtttagggctacacttaaaattttttcttgacttataattgttacaaaatattttaaaatacagaaaagtataaagaaaatagtcatctatttcttaggctttttttttttttttttttttttaattgagacagggtcttgctttgtcacttaggctcaagtgcagtggtgcagtcatggctcactgcagcctcaaagtcctcgactcaagtgatcctcccacttcaggcttccgagtacctgagactataggcatatactaccacacccagctacatttattttaattttagtagagacaaggcctcgctatgttgcacaggctggcctcaaactcctggccccaagggatccttctgccttggcttcccaacgtgttgggattgcaggagtgagctacagctcctggccctttttgagttttaattgaaaagcagcgttggttttttgtgacctgatttcaagtagagtatctttgtagtcagtgatgtttgttttaaaacgctggccagcactactgatttttactaacaacatatctggtaatattatatgagtaaggggtgttagaatgtaggtaggagaaaatgtttttaaggtggaagaatgtcaaaatttgctccattttctcagaggtaattaagtataaaagtatgatattgaatggccttcaaatgtgtagctttcatatatggttgaaatgaaattccatttctgttaaaagcaaagtattgttttagacataacttgtaatacaatcaaggaaccttgggagtggagttataatactcgaaaactgaggtacaacttatttgaaagtaattgctgcttttgcttgtttagctgatacaggtatatccggtcttcagcagtatgttaaatactgcactgtctcttgattaaccttttcttttttttctttttctcttttttttttttgccgagagtctcgctctgccacccaggctggagtgcagtggcaccatcgtggctcactgcaacctccacctcccggattcaagtaattctcctgcctcagactcctgagtagctgggattacaggcgtgcgccaccatgcccggcttatttttgtatttttagaagagatgaggtttcactgtgttggccaggctggtctcgaactcctgaccttgtgatccacccacctcggcctcccaaagtgctgggattacaggtgtgagccaccgcgcccaaccttgattaaccttttctacagtctgctcaagtgagtaaaaaatcctatacgatttttaatttgcatgtgattaaacattttggtgtttgatatatcagatactgtgtttggcttttgttatgtacatccttcaacttgaccaatttaaacaaaaatgtaatttctctgtcctgttggtgtaatgtaatcaagagtttgtgataggaaattaatttttcaaccagtgatacaattttatgactgaatttaatatggacctgttaatgtgacattttcatgtttctgttgagtctgccttgatgaataactcagagcacttattctgtggtacacagagtcagtatttctcatttctggaattggatgctttattttctggtatgcctgtgataagagaggtgatagagtggcttctgcatctaattggtttgaatcctggtattacacttaactgatttgggcaaatgtatcctcgaggctcgatattttgttttgtttttctcccctgtaagagcactcactgctgtcttagcttgggctgctgtgaaaaaaaaaaaaaaccacagactgggtggctttacacgcgcattcctcactgtttttggaggctgggaagtctaaagatcacagtgccccctgattggtgccccagtttggttcctggtagtcctcatacagagagcgcaatagatgtcagtttccttggctcctcaggtgtattggatacaactgactactccagtttttgagacacttttgcaaaacaatgtaaagccattccttctgacaactttctttctcagatgttccctctttcatgagtagttatgccctgtactcaaatcattgcctgctgctctacgtcactgtcttgggagttcacctatccctgtggttatagtgaacactttcataatcccaggtaatgtcattaactgatctggacccatcatggggtggctgtgctgagggagtgttgagctagcccctagtggtaaggagtacactgctgaccttcatcctatggcaattccactttggtgattcactgttcccctcatggagaccaaggaggaatttgctgcatggtaggttggtgaatccagcctgtagcaaagacctggcttggactcctgcaactctttatgaaacttaaccaagaatgattgcatcttccagcgggggaagatgctgagaaggccccttcaggataaactggctccatagcactgctgtaatgatggctcctcatgagtaagcacttggagatttttgtggcttcctgcccactcaccctgctcaccagtccaggtagtttatgatttgagatctagatgtaattttattttatttctttttttttttttgagatggagtttcgctcttgttgcccaggctggagtacaatggtgcaatctcggcccaccacaacctccgcctcccaggttcaagcaattctcctgcctcagcctccctagtagctgggatttacaggcatgtggcaccacgcccagctaattttgtatttttagtagagacagagtttctgcatgttggtcaggcaggtcttgaactcccgacctcaggtgatctgcccgcctcggcctcccaaagtgctgggattacaggcatgagccaccgcggccggccaagacataattttaaaaattatcttccagctggccgggcgcggtggctcacgcctgtaatcccagcactttgggaggccgaggtgggcggatcacaaggtcaggagttcgagatcagcctgactaacatggtgaaaccccgtctttactaaaaatataaaaattagctgggcatgatggcacgggcctgtaatcccagctactcaggactctgaggcagaagaatcgcttgaacccgggaggtggaggttgtggtgagccgagatagcgccactgcactccagcctgggtgacagagcgagctccgtctcaaaaaaaaaaaaaaaattcctcttctttccttcattcattattcttagtctctgtctgtctcatatgagtagataatcatatgagtagctataatgaggactcctcaggggacagattctgtttggccactcagcagaagcatgcaattaccttctcaagattggctcctaaacttactctagatagagccttcaggcaggaaactctatatcccttggctccagaagaatatattcatactcattcaaatgtgctaggcactggccataaagaatattggtgttcattcataactgcctataatgtgctaggagctgtgcataaagcagtgtaacaggatcatcttggaaagcttatgtagtcagtagaggagacagataaactaggaattacatggtaagttgaaagaggaagttaggggtaagatgctgcaccaaatgcaggagattggaaggtttttctggaagaagtgatgtttagggggagtttcagaggtaaatttctggtttggttaacagaagatagtttcactgctcactgagattacagaagaaacaggctggaagagtttggtttcaatatgtcaaatttgatgtgcttataggaaattttatttatttgagacagtttctctctgtcgctcaggctggagtgcagtggtgtgatctcggctcactgaaacctctgcctcctaggttcaagcgattttcccatgtcagcctccccagtagctgggattacaggcgcacggcaccacgcccggctaatttttctattttatggtagaaacgggatatcaccatgttggccaggctggtgtcaaactgctgacctcaaatgatccgccctcctcggcctcccaaagtgctgggattacaggtgtgagccaaggtgcccgacctgatgtgcttgtaagaatttaaatgaagagggtcagtcagcttaggagacgaggttagatgtaaggatttcagacttgtcagtatacaggtggtgattgatgccgtaggaatgactggtattacccagggagctggtgcaaagtaggagccttggggaacatgttaaggggatgtgagagtaagcccacaaagactcagaagtggccagggagtaaggggaaaatgggatagaatagagcaaaagccacgggaggcattccttgaattccttggactcagatatgttaggggacaggaaacacattgaagacaactgaagagacttcagtgtgctgctgagttcttagcagagtagacagctgatttcaccactattccagaccctaaagatttctcctgaaattgcactgttatgcaatttttttccttctctattgccccacctctggggcctacactctttaccttctctgatttatctgacccatccgcatatctctgcaaagtcttaatgtaggtttccaggatttaatgattctttcaatcaactttaaagttcttcaggaagattctccaggtccgtcaacagttttccccttcatgactttgtgacaaagctttcttgttccactatccaggtgttcccaacaagttgctgtaacggtggcccctcataagcttgcctggaaaccctagaaagctcagaaaaattatgaactttgcccagtaagaggctgggaagtcagaaagggttttaaacaaaactgaccccacttgttacatgctcctttcactgtccaaacgtcaaccaaaggaacttttgtgacgctaagacgctcccggcgtcctcacccgttcacagccagagttgatcttagaaggcagggggctcgcaccgagacgctcctagcaagcccctcacgcgagcgaatgactggcgccaggagaaacgcataggacctcccgaagccgccgagagcaaaaggacccatcagagctgtgctgagacccgcygcgggccgggctcgcactcgagattctcgcccgtgggattccagtcctgagctgaacgagagataagtctttgtcaccccccagtctttactgtttcgagaaaccctaagattttttaaaaaaaagcccaaracgtcaagtcggggaactccaacattggggtgtccagaaacactggggtttcaggcgctctgtaaatgcgtccgaggtccgcggttctgcccgcargcccagaccccggcctcacttccgccccgcgccccgcgccccggcctcacttccgccccgcgccccgcgccccgcgccccgcgcgcctccgcccgcccctgctccggccttgcgcctgcgcacagtgggatgcgcggggaggtggtgcgcggggaggtggagggcgaggggcggggctacctcaggtcccgcccgcggcaggcctgtgggctgcgaggaggagctttgcctagcttgcaggcagcgcagggcagacggcggcaggagaagcaagatgaatgcaggctcagatcctgtggtcatcgtctcggcggcgcggaccatcataggtgagtggccggcgggagccgcgcagagtccgaggcgcctgctgcttcggcaggagcgccgagggccggacttgtgtaggagaggggcgtatgtggaggaagccggtcaggccaagccgcgaggagccgcgggatccctggaaccctgcgsctcccgcgttccctgacctggtgctacagccccaccctctcctctcccgatgtgcgyactccgtccctcgtgcttggattggctcccggggtagagccatcgcgtggcctgcctctcccrttggktggcgtagggaggtgttctcctscggggcccctgattggccggctccgggaggcgccatcggtaatgcctgcrgcaggggcggaactgctaggtggtctgagcccggctttgggctggggtcgggctgtcacacaatggctagaagtcgtgacttcgtctccttcgtgccgcatggttttcaacgcccttgacccgccggttccttttgtttgggaagcatggggtcgcatccagtccttcggatttggggaaatagaagggctacagcggcgtccctaggccgttctggaggtcgcctgtccagccctcggctgctgcgagttgtggcacccaccttgacctttgctcagaccagcaggtgtaggaacgtgtgggaggagagggcactgcctcctcgcgtggccttgccaaacagggtcatgaggctcccctgctcgtaggtggttcccgtattacccgcaggcttgtgatgtccacgctctccgcctttctattgtaggttccttcaatggtgccttagctgctgttcctgtccaggacctgggctccactgtcatcaaagaagtcttgaagagggccactgtggctccggaagatgtgtctgaggtcatctttggacatgtcttggcagcaggtaagtctcagtgattccaggagaagtcaggcttattagaaacagcccataaacacacacacacacacacwctctcacacactcacacactctctcactcactcaagttcttgcctccttgcttttgctcagagttccctctgttatgattcctcctgttggcccccttcttccagccctgtcagtagcttctatccagcttgagactcagcttcttggccaggcagggtggctcccgcctgtaatcccagcactttgggaggcggaggaggaaggatcacttgagtccagaagtttgagactagcctgggcaacaaagcaagaccccgtctctacaaaaaataaaatagccaggtatgatggcctgtgcctcccagctactggagaggctgaggtgggaggatcacttgagcccaggagtttgagactgcagtgattgtgtcactgcactccgtcatgggtgacagagtgagaccccttctctaaacaaacaaaaagacttagcttcattaatatgctttttgtgaatgaacttagaccactgacctacaccacctacactgccttttcttttccttttttttttttttttttttttttttttgagacggagtctctctctgtggcccaggctggagtgcagtggcgtgatctcggctcactgcaagctccgtctcccggtttcacgccattctcctgcctcagcctcccgagtagctgggactacaggcggcccactgccttttcattcttacgaagcagggccggccgggcccggtggctcacgcctgtaatcccagcactctgggaggccgaggtgggcggatcatgaggtcaggagatcaagaccatcctggctgacacggtgaaaccccgtttctactaaaaatacaaaaaattagccgggtgtggtggcgggcgcctgtattcccagctacttgggaggctgagacaggagaatggcgtgaacccgggaggcggagcttgcagtgagctgagattgtgccactgcactccattcagcctgggcaacagagtgagactccttttaaaaagaagaagaagaagcagcagcagggccagcctgacgcataggaaagtatgcctgctcctccttactacctcaaagtgtcactcattcaacaaaaatgtattcagttcctcctatgtgccccatactgtgcttagtgctgggagtatggttccaacaatacaggtaagttccctgccctcttagggctcagttctgagcttggaaaataggtgccacatcatgccccttgcaaatgggrcatatcactccccagaggaatatagctgagtcctgagagtgcccccatcttctgattctttgggtttgaacactcgtaattaattaattaattattattattattatttaaagagacagggtctcactctgttgtccaggctggaatgcagtggtgtaatcaatcgtagcccactataacctcaaactcctgggctccacggtatcctcccacctcagcctctggagtagctgggattacaggagcaggccaccacacctggctaattttttaaatttttttgtagaagtggagtctgtctgttgcctgggcgtgagtgcaatggctgttcacaggcacaatcatggtgcaccatgcccttgaacttctgagctagctgggactaccggtgcatgtctactaagtttaaggcttttaaagcactgtgctaaatgctttcctttcattacctcatttaatcttcctcacaagtctgttatatcctattatcttcattttacaaatgaataaatgagagtttaagaggttaaatgacttaccagggtcacagtttgaagtggagctagcacttgaacttagatctgtcctattccttgagccagataccttctacaatcatgtaacaaatgtttattgagcacctactttgtgccaggcactattttagcagctggagataagcaatgttcatatcagatagaaattctcattctcatgaagctcgtagtatgctaaatgctagcattattaattgtgttagcacctcatttctttctttttctttttttgagatggagtcccactctgttgcccaggctggagtgcagtgacgcaatcttggctcactgcaacctctgcctcccgggttccagtgattcttctgcctcagcctcccaagtgactgggattacaggtgcctgccactgtgcccagctaatttttgtatttttagtagagatggggtttcaacatgttggccaggctggtctcgaacttctgacctcaagttatccacccgcctcggcctcccaaagtgctgggattacaggcatgagccaccatgcccagccctgtacctcatttcttctttttcttttttttgagatggagtctcactctgtcgcccaggctggtggagtgcagccgtacaatctcggctcactgcaacctctgtctcaggttcaagcaattctcctgcctcaacctcctgagtagctgggattacaggcgtgcaccaccatgcccagctaatttttgtatttttagtasagagrgggggtttcaccatattgtccaggctggtctcaaactcctgacctcaagtaatgcgcccccccccccggcctcccaaagtgctgggattacaggtgtgagccactgctcacagcctgaggcaccgcactgggcctgtctttttaatatgtatatgatcctgcatatgttttcagtctcaagtaaccttacccgtttttagtttccagcctaatcccagaytgataacattgtgatgaatataatctctaagtttttatcagcgacttmtttgctagttcttccccacaaactctccaaggaagggtggtaggtttgagtatatctgaaactgggaatagagtaaccactttataaacatttaccattgactctgataacagacaatggcgattgagaatatttgaaacttttaactccattctcttctgtgctactttaagtaaattatgtatttcttcccaactaaaggaagtcccatagttgaattatgaaaagatatttgtgtttcagtactcagaatgagaaaaaaaggtatttgtgaattctgagtttgtatatattttgttatataaccatttaagcatagtgtaatgaatactaagcaagaacagaactgcttattatcaaaggttttcctttttaagtaaccctttttcttctcaagtgtcttaagccatgatcttgggagcaaatggccctagttagaaacactgataatgcctaggttatatcctgtgtttattagacataggtttgataatgcttatttaagcacccccccgcacttttttttttttgagacggagtttcgcccttgttgcccaggctggagtgtaatggtgtgatctcagctcaccgcaacctccgcttcccaggttcaagcaattctcctgcctcagcctccctagtaactaggattacactcatgcgccaccacgcctagctaattttgtatttttagtacagacagagtttctccatgttggtcaggctggtctcaaactcccgacctcaggtgatctgccctccttggcctcccaaagtgctgggattacaggcatgagccaccgcgcccaactatttaagccatatcaaaagatgaggatgacacttctttcttaatgtattaatgacttatttatggaggagaaagcttatatctatgaaatacctacagagcagcacaaggcagtatatattcaagggctagactgtgacaggtggagagtgtatacaggcctttttgcctccagtgggcacttacttgacctgtaggctttcagaagtggcaggtaacccaactggcaattttccacacactttcactgtgacattttgtctttctccttgattgctaagagtcctctgtgttcctctttctaggctgtgggcagaatcctgttagacaagccagtgtgggtgcaggaattccctactctgttccagcatggagctgccagatgatctgtgggtcaggcctaaaagctgtgtgccttgcagtccagtcaatagggataggagactccagcattgtggttgcaggaggcatggaaaatatgagcaaggtaaggcctctctgatgaggtggctttcactgacctcacactgagaaactcatgtctatgccagaacagagtaaacagatgcatagcagagctggaaccaaacagtgaacaaataaacagaaatgacaaccttgatccctacttgaatgtgaagtattcttcagtttgggtgggaaatccgggttgataagaagtttatcaaccagtgtgattggaaccgaatatactttttctaaactattaatgaagcatgtaatattttctgaattaaattcatattagttgcttgatgtccttggttttaaatttctttcccattgtgagtaaaaggcaaaaaacagatgttgccacttaccttcctgcacatgacaaggagatcctggggaccagactttttgaccttttcagggtatagaacatgtaaaagaggaccaccaagtggtgcccttctccagtaggtttgccaggcatgatttgtttcaccaagttccatacctcaaactggcatagtggttgaaagaaaaactataccccctgcttcctactgatgcagctcaggggctgaggtgcagattccctagatagaagctgattcagcccagccattgctgaggttcaggaggaggcaggctaaaggtaacaaaaataatcggagtgattttgatgggatgacactgacatctgtgtagtactttaccaggtgcttttgtacatgtgttcacaacagccccatatagggtagatgataccattcccagtttacaggtaaggaaactgaggaccagagccagcattcaaatacaactcttccgactctaagtccaatcaatgactctttccattctaatatacctgctgttgagttggtgagagttaagactggccgctactcagaaatccctccccatcatttagttagcctgattattctcactgtagacattatgtcatccattgaaataggtaacacattgttagctttacttaagcccttagaggatttcttcatttaacagataattaattgcctcgatggaaagaataaatggaattcttaaggaaacaggacacagaatgggtaggtttgagggagaattgaaaatgggtaggtaggagagtaatcgttcccaacaataggaaagatgaagtctgctaattccaggggtctttagaccttggcctggctgaggacctagaactggggagaagggctgcaaaggggcctagatgaagacttaggaaatactagatagttttgagttgtattctggggagaagactaattgcaactaagcctaaatccatttttatttctgacttctaggctcctcacttggcttacttgagaacaggagtaaagataggtgagatgccactgactgacagtatactctgtgatggtcttacagatgcatttcacaactgtcatatgggtattacaggtaaggcagacatggctgaaactgtattagctttaaaaaggttaaaaagacmatatactaatctgcttcttaggtgctttcgtccktatggccagagactgtcttaaggatttttatatctcttctttgattaactgaagtgaagtaagtattctcttctttgtgaactcttgattatcagagaatgttagaagtgggaagtacctcagagttcttctggatcaacccctcattttaccaaatgaagaaacagggcccacaaatagtgcttctgtggcagaggtagtgacagagataaaccagttgtttttttggtacctagctgtactttttgtactacacaattgggttattggtcattcatgctgaagggtcctgtggtctaagtttaatggcaaagcaactgggaaatcaaaagcactcttgtctttagtatacatgtaaaacttaagaaacagaatagacattttagagttaaagaatcaaaccctgagaagttaagcaccttgctcaaatgcatgcagcaatggctctggttttatgtaacacataaatatgtgaaaaaggtaatggggaaaagtacaagattccaagagggaactgtgtgcatgaatgctaggaaggaaggaagggcttagggatatgggaagcaatgagaagctcaaggcatcttgaccacttctcgacttacagccacaacagagaaggctataaaaacacaggcagacaatggaagacactgtgtgaccaactgcctcaaccataactagaggtggtcattaaaaattcagatcccgagccctttccaaggtgtactgtggattgaatggtactcttccagcctccagaactgtaagaaaataaattgctcttctttagaaaaaaagaaaagaaaaaaggctcaggtcatgatggagtaattgacaaagattagatttcctactataaacaagcataaaacttgtgaaaatatataaagccactgttttatgtatgtcaggttttgactaatactcatgtaagactgagatccttgagagaagggaaaaccccactgtcactgtctctacccagggcacttcccaaactgtgttatggagaggcagagcctaagctggaaacagtggtctcagtgatctgaagaagcagagaatttggggcttctgagatggctggagtttgtggggcagaataagggggagaagaaaaaaagagctccagaaatctgcaaaaggttccccttaagtctttgatcaaatactaagcttgtagataacagcttacaaggcctagtagaaaagagctgcaaaggagaggtgaactggagattttatagattactaggagataaaagttctggacaagcgagtggaaaccttactgaactccttggacactccattgacatctcagaaagaccacagtttaggggtagggccaaagccatagagtaaaagctactctagacccaaactaataagcttaaaaacaagcctcaaaaggatcaaggtgatttgccagtattttgactgcttgtggaaacaaaactcaatatattctctaaagataataaaatctctatgtccagttatgtagcaactataatgttcagcatgcaatgagaactttctagatacacaaagaattaggaaaatatagcttacaaccagggtggaaaaaaaccacaacagtcaacagaccctgcaatactagaattatcagatgaggatcttaaaggctctattttacatatgtttaaagatacaaaggaaaatataatcttcatagaggaatagatgtggacatctcaggagtaaaaggaaaaaatataaacaagaaccaaatagaaattctagaacttgcaaagtacacaatctgaaattaagaattcactgggatggggccgggcatggtggctcgcacctgtaatcccagcaccttgggaggctgaggtgggaggatcacttgaggctgggggtttgagactaggctgagcaacatagttagacctcatctctaaaaaaaaagaaaaaaaaattctgaatggccttaacagcatcttggagacagaagaaaaagggtcaggaagtttgaagatagatcatatacacgacctgaagaacacagagaaaaataatgaagaataaatgaacaggccaggcacggtagctcacgcttgtaatcccagcactttgggaggccaagccgggtagatcatctgaggtcaggagttcaagaccagcctggccaacatggggaaaccctgtctctactaaaaatacaaaaatgagctggatgtggtggcccatgcctgtaatcccaactacttgggaggctgaggcagaagaatagcttgaacccaggaggtggaggttgcagcaagctgagatcacaccattgcgctccagcctgggtaacaaacaaaactctgtctcaaaaaattaaattaaattaaattaaattaaaaaataggccaggtgtggtggctcatgcctgtaatcccagcactttgggaggtcaaygcaggcagatcacctgaggtcgggagtttgagacccacatgaccaacatggagaaactccatctctactaaaaatacaaaattagccaggctggtggcgcatgcctgtaatcccagctactcgggaggctgaggcaggagaatcgcttgaacctgggaggcggaggttgcgttgagctgagatcacgccattgcactccagcctgagcaacaagaatgaaactccgtctcaaaaaaataaaatataaatgaacagagccttggtggtctgcaggacaaaataaataggactagcatgcatggaataggaatctcatacataaggaagagagagaatggggcagaaaaaaactgaagaaaatttccacatttggtgtgaaaagaagttcaaagaccaagatagacaagggaaaaattacaccttagcaaattgtagcaaaaagttaaaaaaagatcatgccactgcactccagtctgggcaacagagtgagactctgtctcaaaaaaaaaaaaaacaagagtgaaagtgaagagccatttttagatgaaggaaaatgaattgcctgcacacctacactacaagaaatactaaaggagccaggcatggtggtatgtgcctgtagtcccacctactcaagagctgaggcaagagattgcttgagtccaagagtttgagtctagcctgggcaatgctatcatagtctactatgattgcacctgtgagtatctactgcattccagtctggttaacatagtgacacaacaacaacaacaacaacaaaagaatagcttccagccgggcgcggtggctcacgcctgtaatcctagcactttgggaggccgaggcgggcggatcatgaggtcaggagattgagaccatcctggctaacacggtgaaaccccatctctactaaaactacaaaaaattagccaggtgttgcagcaggtgcctgtagtcccagctactctggaggccaagggaggagacttgcttgaacctaagaggcggaggttgcagtaagctgagatattgcaccattgcactccagcctgggcaacaagaatgaaactccatctctaaataaataaataaatagtgtaaataaatactgtataaaatgcaaagcactcagaatagccaaaacaattttgaagtcagaaaatagcacttacatgctctgattttaacattacctataaagctgttgtaaacaagacaatgtggttttggcataaggacagagaaagagaacagagttcagaaatagacccagacttatgctcgttttcaacaaaggcatcaatggaatgaaatggagaaattaaagtcttttcaacaaatggtgctggaataacagattactcacatgggaaagatgaacctagatccctacctcacaccctatataaaagctaatttgagataaatcatggatttaaaaataaaagcaaaaaatgtaaagcttctagaagtatatataagagaatagcttttacagggtgcagtggcaggtgcctatagtcccagctacyagggaggctgtggtgggaggatcacttgaggccagcagtttgaggttgtatagtatactatggttgattttgcctgttagtagctgctgcactccagcctggtcaacatagtgagacatcatccaacaaaaaaaaaaaaaaagaaagaaaaacagcttgataagtaaagacaagacatagaaagcaaagcaataacttttttgtgtgtgtgtgtggagacgggtctcactctggcacccagattggagtgcagtggctcaatcttggctcactgcaacccccacctcagcctcctgagtagctgggaccacaggtactcaccaccatgcctggctaattttttgtattttttgtagaaatggggtttcaccatgttgcccaggctggcctcaaactcctgagctcaagggatcctcccacctcagcctcccaaagtgctgggattacaggtgtgacccaccaaacctggccaattctcacatttgtagaagagagttacaaatacggaaagggagaagaatgtagcttgtggtgttaggttgcattttggagaactcaaaatgcagtatgaactcaaggtgttaccatgagtgtgtgtgtatatgtaaaattataaataatacatatggaagtttctactgaacagacctagaaacaatgacaaaccagtaacaacaagcagtcctgacacccagatcttctaaatacatttatccactaaaaggaactaaggttgtttggagaaatggccctttccaaggctagggaaaaaatgctaaaaaattaaggacatgctcagggacatgttgaaagcacacaggaggcagcctacggggcttccactttcctgtagtggaattttgaacaatttgagcatcagagtcagtaatgatagtaatgggttgtaactgcccaaattttgaacaatttcagcgtgcaaataagttatgatagtaatgggttgtaactgcctaaattttgaacaatttcagcgtgcaaataagtaatgatagtaatgggttataactgcccaagtattgaaaaatttcagcatcaaagtaagtaatgaragtaatgagttataacttattcaataaaatgaaaatgtatgagtccatcctgatataaataactgaataaatgggagaaaaggaaaaggttttctttrtggtaaaatgccaattaatatcttaccaatagaaggaatgttggagttagaaagtcatgaatgaatgctaaaactagtgggtgaaaatatgatggggaagaagatatttggataatccaaaaagaacctctgataaattattgattacttataaatgaaaaaatggtacctttaaaagctagaaacctggtgaataccaaaccattttaaccaagtgatcaaagataacatcacctgggataaactgattgtcatttgtgtcctaataagactcactgagaaaaatcatactatcattcagtggtatacctgccttttggcagaatcttaatctaattctgaggaaacatcagacaaatcaaaattgatgacccttaacaaaagaactcgcccatgttcttcaaaaatatcaagcttaagaagcatagtctgaagaactgttacagacaaaagcaaactagagagattgatagttgtacaatgcatgcttctttattggctcaaataaaggagctagaaggacattactgaaatataggtgaartttgaatgtggaccaaggattagataatagtgtttgattcatgttaaatttcctgatttttgttttgttttgtgagacagggtcacccaggctggagtgcagaggcacaatcatggctcactgcagccttgaactcytaggctcaagtgatccttctgcctcagcctcccaagcagctaggactactagctacatggcacacacaccatgcccggctaaatttatttttaatggagacagggtctcgctgtgcccaggctggtctcaaactcctgggctcaagtgatcctcccacctcggcctcccaaaatgctgggattacaggtgtgagccgccacacttggcccaatttcttgagttttataactgtgcttatgtaagaaagtggccttgttttggggaagtatacactgaaattaaaatttaagagtaagaaggcattgtatctccaactttctctcagatggttcagaaagaaaatattaaagcaaatggagggaaaatataaatggtgactctgggtgaaggaaatttctgtaagtttacaattatatagaaagggaaggagagaagtatgactcctgagagtcactgcaacatttccaaaccaactgccagtggcaggcagggccaccccacacagagcattgcacaggccaccatgagcctgctagcatatgtggtcagtcagtgcttggtcaaatgtggacgacttgagctatcaaatgccagttcatgaaaatgttagttttttgctgtttttctcctttcccagctgaaaatgtagccaaaaaatggcaagtgagtagagaagatcaggacaaggttgcagttctgtcccagaacaggacagagaatgcacagaaagctggccattttgacaaagagattgtaccagttttggtgtcaactagaaraggtgagtatatcatagtggtttaaacatcaacctatttataggtaagagtaacatctaaaagagtaatacataggaatctttagaaattatatcttagttatgtttttcaggttgcaartatatgtcctggatacatgaatgtggggagggggtatgctgggtttacrggacacggtaacatgggacctatgtcagcactcaagcactcttggttccagagcgtccatgaccactgtgcacacacagcaggtttcatgagaagctggagcactggctcatggttgttaggaggcaccagctgacctgtttcctgtataggctcaacctcctcagaagtggacacccattacttctcgctgtttctgtgtgatctccatttcacatttctaaagggtggatcttttggggtcactcgctattttctaatacagaatgctcccgtcaagctcccttattgataactgatatctcttatgtcmtgccagcagtgcacgattggctytgagactgcctgatccactcactcgtaaccagccaagtactatgacccaaactatagcagaatttggcacaaacaggtccctggtagctactttcctcaggaaggcctatggatttggaaaacacaggtgtctcataaggacatactcataaattgttttcatgtacaataattcttgtgtgtactttcctcctgttgtcatcaaagtggtcacatattaaaacttttctgctaaatatgaatcctcatgtttaatggcagagaacccaccattcccagcacacttacttctgtctctggactaatcttgagtaattggttttcctttgcttaggtcttattgaagttaaaacagatgagtttcctcgccatgggagcaacatagaagccatgtccaagctaaagccttactttcttactgatggaacgggaacagtcaccccagccaatgcttcaggttagattttctgaaggacatctgggggaatactatgttctataatgtctaccgagtgaatatttttctctttatttatatacaaaagtactattttttgggacagggactcactctgccagccaggttcgtgtgcagcaatatgatcattgctcacttgcagcctcaaactcctgggctcaagtgagccccctgccttaacctcccaagtagctgggggactacaggcatgagccaccacacccaactcaatatttatgtacaaaattatycttaaaacagttkaaggaaacatgtcatttctctgtatttgatcattgacttaacctatactgaaagaattaatttggtttcttgacatcccaactagacatacaaatgaagaagtaaattagggaacttcagtttatctacctttgtatttttccagtaccagaaactcccaatacctccttgtgaagcccaggcttattcttccatttcctgtcagagatctcccctccccaactgctgtaatcctttttttttctttttgagacggagcctcactctgtcgcccaggctggagtgcagtggtgcratcttggctcactgcaatctccgcctcccaggttcaagcaattctcctgtctcagcctcctgagtggctgggactacaggcgcacaccaccacaccggctgatttttctattttaagtagagatggctttcaccctattggtcaggctggtctcaaactcctgacctcaggtgattcaccctcctccacctcccaaagtgctgggattacaggcgtgagccaccacgcccagccccgactactgtaatcctaccactttctctagttggaaagttttgtggtcaatatattgccaaacataatttctatgtaaagtctgttgaattatagtaaatgccttagccaacaggtaaaatcatttaactcatgtcttcaggtggtaaagaagccacagatatgtaactgaggttaataagcatggtagaaattaagtcactcatattttacaggaataaatgatggtgctgcagctgtygttcttatgaagaagtcagaagctgataaacgtggrcttacacctttagcacggatagtttcctggtcccaagtgggtgtggagccttccattatgggaataggaccaattccagccataaagcaagctgtgagtataaccytattcccttttatgaaatttgtcttcctgttagccttaagtgagcttattcatgtagttagctctagtctttccctaccagaagagtaaccaagagcatttatttctatttttgagataaggtcttgctctgttgtccaggctggagtgcagtggcaccatcatagctcactgcagcctcaaaactcctaggctcaaatattcctcctgccttagcctcccattacctcgaactacaggtgcaccamgccttcttcatttcgtagagacaaggtctatgtcgcccaggctggttttgaactcctgagttcaattgatcctcttgccttaggctccccaagtgttgagatttcaggtgtgagccactacccccagccactgagagcatttggatcacatgctttctaggggaactgattctgttacattagccttaggtacacrtaacagatgctactggttcaaaattttaagacaatttagaatttctaagggatcttttagatcacacccttaaccttttggatggaatggatgtcactaaggcaaaaatgtgtgagaatgtcactgtattaacctaagaacaaaccaaastagcagttaccagtatcatgcagcatatatttatgttgacaaagaatggtttaactttagcctttccacccaagtttagacctcttttctatgaatctttcctctaggttacaaaagcaggttggtcactggaagatgttgacatatttgaaatcaatgaagcctttgcagctgtctctgctgcaatagttaaagaacttggattaaacccagagaaggtaaagatgcacaagtaaccctgagagcttaccagtgaatttcacaatccaattttaagatagtatcttctaggtgttggccatgtgggtaatagttaaagaaatactagttactaggactgagttcattacttcccaaggtaaaaaaaaaaaaaaaaaaaaaaagacattggcttacttggcataaaaggaacgaggtaagataggcagggatgaattttcacaaaggtgtaaatttattcctaagcagttaaaatgaaaatttgagtttgaaagggtagcatgctgatacattaagaggaaaaagacaagtttaagattttaaactgtgtccacagaagaataaacaatctaaatcttttctcccccgytaggtcaatattgaaggaggggctatagccttgggccaccctcttggagcatctggctgtcgaattcttgtgaccctgttacacacactggagagaatgggcagaartcgtggtgttgcagccctgtgcattgggggtgggatgggaatagcaatgtgtgttcagagagaatgaattgcttaaactttgaacaacctcaatttctttttaaactaataaagtactaggttgcaatatgtgaaatcagaggaccaaagtacagatggaaaccatttcctacatcacaaaaacccaagtttacagcttgtactttactttaatgtgtaatactcaactcamggtacaagacaattgcatytaacattgttataaataaaaggaacatcagatcaatcawwaagggctccagagtgaacagcatcttcataacttccatgtttatcatctttactttctggatgtaatttaataagatcatcaattcgaagaatggkgattgcagcttctgttgcaaatttcaaactcttaactttaactatggttggttcaaacacccctgcttgtttgttgtctcgaggtttaccattgctcaaatcaagaccaatcctgcaattaagaaagaattatttaacggccgcttacaatttcattaggtggcctattaactccagcatttcattcaagtattaaggttgatttttaaatcagactagagatcttgtaggtagtctttctaccaaaagaagcagggagagattagcaatcacagttaacgaagacacaccagtgctaataattagtcattatcccttgaattacagtgactgaacaacaaatgcttgctgtgaagtttttcatgttaagtatttgacaagtctgttacttatgtttgctgacatgtaattgactactatcctttttaatgcaacctgttctgcagaggttaacaaagagcgggaaaccatgcttaccattttagatttttacgttctgggttaacctgggcctcattatgaaaagctcttaattttgcaaccagatctgtggagtcctgggcagcattaactgctagtgtattgggaataacaagaagtgatcttgcaaactctgcaatcgcaagctgttcccgagacccctaggaaaagaagaaaattaggtgacttcacaaaagggaaaaaaaaaattgaagtccacagctactgctctcaggcctctaagacaagaaatgactgttcttaccatgctggttgcatagttttcaaggtatatggaaagggctgcttctacagcacccccaccgggaaccacagattttgactccaaaactctcttcactacacaaagtgcatcatgtaaagagcgctccatctcatcacacatgaaatcatttgccccacgtaagataatcgatgcagacgtacgagccttagtactgttcaaaacaaaagtacaattcttgtaatagcatttttaaaaatttttttttgccaagaccatcaatttctcaaaaaaaatggcattttaataaaataagtctacataaagttcccttaagtcctgcctacacaggatatttagatatactatacagaaacaatgtctagtccmtgcagaagagatgaaaatggttacttcatctcaatttacagtggcccaatgttattttatcccatgcgtataactgctcgtatcactgtgagactacaagcagcaaataaatgggaagaaaacctacttttacttaacaaaatcggtataactttacaattttagaaagtggctcttactttttgattaagatcagctcatcatcacaaattctctcctgtaccacttcttctgcctgtcccaacattgcagcttcaaaagtttcttcaccttccaaattggccagggttgacagaatagttgctaataagagagttacaaaggatctgtgaatattgctctttcatgattttaatatccttggactcagtagcatttgtgrtaaaagtgctatattacaagtttagaatttagttaggcagcacacggtaactccttttatcctaagatggaactgtcattttagaaatgaacaaattcagttcacaaatttccaacaaaatttctccagttacatgaaaaatggctctataaatgtgttggtagcacaaagcattaagagaatataaatgtttttgagctgttttctgtcaatattcyaatgtaaaaagacctttgataggatcagggataataaaagtattttatgtgacagccagcacaagacatacctccagaagctttggcaatgcgtttaaggtccctttttaaaactcttctaactgccatagcaccagcctccacaaaatacttcagacacatatcatcaattccaccagtggttagaataacattggcaccagttgccaggatcttctgaattctctccttggtgatatctgattctctgcaaagtatttttgtaacctgagttaccttctgtgatttttaaaaataatttaacttccattaagtatttatcacaagataatcatagatcaaattgtattatcctttgttatctctgaccagaatttaaattagtccaattcatggaaaatttgaaggaattaaaaattaccacttagctctccccaacccaaatttgaattactaattgagaactatggttaaacagggaacacaggtcctgccttcaaggatctagtggggagagggattaccaatcacactccagggcaagtgtcactaaagtggtatgcagagattacaagcacataaaagacataaatttagcctaggaggtggacaatgaagatgagtccaggccaagtgcagtggctcacgcctgtaatcccagcactttgggaggctgaggcgggcagatcacctgaggtcaggagttcgagaccaacctggccaacacggtgaaaccgcctctactaaaaatacaaaaaattagttgggcctggtggtgggcgcctgtaatcccagatactcaggagactgaggcaggagtatcacttaaacccggaaggcggaggtcgcagtgagccgagaccgtgccactgcactccagcctgggcaacaagagcaaaactccgtctcaaaaacaaacaaacaaacaaaaacaggagtccagagttgaaagcacaaaagaaggcagaaccagaaaagtgaaaaaccttgcaggttacaccaaacaatctagatactaagcttaatatctctaagcaagactagtatatcatctgtgttttcaaaaggattccctgattatcaatgtggaaactgcactgaatggctgaagacaagaagataataacatgagatataagctgaaagacaacctaaacagaaaagtcaaattttatggcttgggtgactcctggagtaaaataaataacaagagttttgggggcaggatgggaaatgagagtttagttgaggacaagattaagtttgaagtctctgctgttactcaggtgaagctcccaggaggcagtcacttacatcatggaaaccataaactatgggagatccagatttgaagagtcaatatgagtgaagccatgtgaatagatcattcgaagaatttttaaagtaaaatgaattacagatcaacctcaaaagcagcttgtctactaaacaagtactgtgtgctacacactgttatataaactcatggtaaaaactgtaataagccccaggaagaaaaaatacaggaagttacaacagaatataatttagattgaagaagaaagaaaagcttctctaagagactagcttgggtgtgtttctacaacagtctaggcaagaaaatgaaaagtaggtaaatttaatttggaggtagaaatcaagcggtcttggtgacagattaggagaaaaagtgttggtaaaaaggaggagttaaggacatttcctagttttctgcctgtgtgaaggactccccatcactaaaatggtcaaaagcagatttgcggtattatcacaagttcagttttagacatgttcactttgagatgcttgaaaagcattctactagatagaggtatgtgtgtttggagcttagagaaacagctgaaagagtctctggcatagagagataatacatgaagtcatgggaacaaaggggctatcctggagagtattatgacatggtccagacaaagcagcatcacaaagccttccatccccgaaagcatttcaagaaggacataatcaaagggttgctaaaggtcaagtaagaggaaggctgaaaatgtcttccgaatttcacgctagagaccttaacatgcagtccctcaaatggagaacagggctgaaaagggatgagaagaaaagcaccagagaagttttgtgtagtaaaccactcatgacatctgcctgtaaagatgtacgatagggagtacctatagcacaaggatgtacgaagaagcttgaaggacaaaagagccacaggaagaatccaggaaagagcataattagttgaagatgcaagtatgaaacaagaatcaaagaaaaggctctagagcagaaggaaacagactctagaacacttactgtagagggactggctttgatggaagaaaggacactttgttgtatgaggaaggaaggaaaaaagaatacccgtgcagactgatttaaaagatgacagcacatttcttactcttggcaaagctttcttgtaggtctggtttaactactgtttaaactattttttttttttttttttttttgagacagggtctcgctgtcacccaggttggagtgcagtggtacaatcacagctcactgcagcctcaacctcctgggcttcagattcttgccacctcagcctctcaaagtgttgcgattacaggcatgagccactgtgcccagcctaaacaatttattgttttaagtgactgtcaggcagtcaaatctatagcaatggtcacactacctccaccattagctcttctggcatgccaaccactaatatcacctgcacctccagtatctagcaaacagtaggttacagtcaatactatactgctgagttctgtactgctttgaggaaattagattcctgtcttttacatctttaatattaatagactcatacaatcaaaattccacaaaaaggccgattttcatataggttgtataaccccaaatccctctaaaaacaccaccaggctaatttttctggaagtaaaatagtttgacttggctaaaaatgttaaagtcctccaagacactcacacttaaaaggccaaaaataatctctcaacatacctctgtctaatttggtccagtttttcagggtctgtaatgaccacctgtacaccaagcttcatttttgttttttgcaggctgaagtcaaggcaagcaatttttgcatttacgattctcttgggcatgcctacaattgaacataagattaagttaatacgtctatccttaaaagcataataaagagtacctataatcgattgtatgtaaacacacaaatttagactaattcattgcattttatcttagaaaaattttatggcattaaatgcacgtaatttcttttaattcacattccttctaccatgttgtatgtgctttaaattacaaaaagatgtactgcacataatccacaaaaaaacattttttatttttttttttttttgagacggagtctcactctgtagcccaggctggagtgcagtggtgtgatcttggctcactgcaatctccgcctcccaggttccagtgattctccttcctcagcctcccaagtagctgggactacaggcaggtgccaccatgcccagctaatttttgtattttttagtagagatgaggtttcaccatattggacaggctgctctcaaactcctgccctcgtgatccacctgactcagcctcccaaagtgctgggattacaggcatgagccaccgcgcccagccaaaagaaaagctagttttaatctgtagcaatctcattctataaaccaaatcccaaaccttaccctgggatcccaccacacagttgagtgcatagccactgatgagcatactctccatttgacttctcccatgggctttcaaaatattaacagagttgactggatagcgtggctggcctcttatgtctgtgtatttaatagcaagtacagcatctactaccatgttagcaaagaaatcaccatttctacgccaaaagttaaggacagtaacaggtttggaatggacaaagggtacacacgtgaaaaatcaagggtaatttcaagggacttccttttagtaatctaatctattaaagcagcaagcattacttgtcaccaaaatgttacaacattatcactatctgcaattcatatcacttttagacatgctttttattaccttttcaccctaaaaaagcagggaaggcaacaggtaatttcaatacagcattactcctctctattgatatcaatttgcataaaattggttattcaaaattttattgcacaaaattgatactgctgctactacgcacgcgtgcgcgcaacacatgcgcacacacgcacccactcccgagacagggtcttgctatgttgcccacattggactggcactcctgggttcaattaatactcctacctcagcctccttagtagctgggactacaggcacataccaccatgcccatctcaaagtcttatgctttaaaaagtctaaattttatctgacaaccacaaggatacattccaatgattttggaagacatggatgtcttagcagcattaatcaggcaatctcttcccagttcatctgtgttaacaattaggttttcattgatataacgcactgcttccctgtttaaaagtgtgggggagaaaaacgcttataaagtcactactcaaactctttgcattcatcatgcttaacacagagccaaaatgtcgtaagtaataatacccgttcagccatttcatataggaggaggacatgaaaaaaccctccctcttcagatcatggcaagtttaatctatcccataagcatagccactaaaatctattattaggagaaaatgtggtagtcaaatgagaaaaaagatactggtccaagtttttaacttcaaatattactacttaaatgctaaaacatttaaattgaaggttttcaaattaaaatttagttattaatcaaaacgttaagacaacacagtttacaactattacatcaaaaaaaatttctctgaatgcaaacaatcttacttgcaagcaagtcgatagccactaataactgatgtgggatgaattttctgtttgactaattcatctgcattttttaggagttctgctgcaataataacctgttgagaaaacattcaccggtctgagtgtgccggatattcaacatgtgcaatacatatggaatgacactaaaatggccatatattattaaccaaaatggtagtgatgaaatgaattaactggttattagaaacctgggcgtgaagggagaagaacgctacaaaacactccaagtcctccacgttactcataaattcttggaaactgccactttaagcaaaacaatggacagcaatttctcaaatacagttgtttattgtaacgctgatggggggaggaaaacttgtttttttatacatcatctttcctcttaaagtcagtttccatgaagccactgtggatgttcagtgaggtcttattgtattataaatgcaaatggccaaaactgggtaggagccagaaaaatgttctaagaaactagttcagcaataagaaactagttcatcaatacaaccgtaaaagacaacacatctattacctttagaaaaaatgctcaacagaagctaaaccgagtgtgactattcatatgacctatattaggctattattttatttaaaaaagatagttcttcaagttgataaaacactaagaaatatttttaaagcaaaaagactgtcagcttcttatggaaggaaaactacatttgttaaatcacattatcgtaagttagacaaagatcatattcatattttaggagtagattccattctttcatggctaaagtttaatctagaaatacattttccccacaaactatctagtttctccagaattaacatctttctcaccaaacaatagtgtttctactataccagcatgctggatgatctatgaagagtttatactgtgtatcacatttactgactcggtaagatcacactgtcatatcatgatgtatttattaatttctcacactcccattttgaattcctgagattacctgtcaggatttaaaaaatagaacaggctgagtgcagctcatgcgtgtaatcccagcactacagaggccgagaagggaggatcacttgaggccaggagttcaagaccagcctgggcaacatagcgagaccctgtctcttaaaaaaaaaaaaaagagg

SEQ ID NO: 8796 - DNA, 60422 bp, Homo sapiens
  misc_feature (1)...(60422): n = A,T,C or G, or insertion/deletion polymorphism (see Tables 1-2)
atcacttgaaaccagaaggcagaggttgcagtgagccgagatagtgccactgcactccagcctgggcgaaagagtgaaactctgtctcaaaaaacaaaacaaaacaaaacaaatacaaaaattagccaggcgtgatggcaggcacctgtaatcccagctacttgggaggctgaggcaggagaattgcttgaatctgggaggtggaggttgcagtgagcctaggtcgtgccactgcactccagcctgggtgatagaacgagactctgtctcaaataaaaaaaaaagcgcaatcattctgaatctctcactctaccccttgagaagactccgccaccaacctctttttcagttcaggtgactcaagcagggctgaccccaccccctgcctccaaggatcagcttgtgtcccaggcaccccatggtcactgtttttggtttgggactggctcatgacccaagctaggtagcaggcagagctttctgtgttagtctggaaagacttcttggagtctaggctaggacactactcatcttttttgttttgttttgttttgtttttgtttttgttttgagacagagtcttgctctgttgcccaggctggagtgcagtggtgcaatctcactgcaacctctgcctcctgggcccatgtgttcctcctgcctcagcctcctgagtaagtttccctgggacttttgctggaactataggaaaaaggaccaagtcagcccagtgcagatggtggtcactgttctatcatgcagggaaacctgcctgagaacaaaaccacactgattctaaagcagagactagagagtgagaaatagaaagaaagagacagggcctggtgcagtggccctagcctgtaatcccagaattttgggatgttgaggcaggaggatcgcttgaaaccagaagtgtgagatcagcctgggcaacaaaatgagaccctgtccctattacaaaaaaaaaaaaaaaaagaaggaggaggggtgggggagggaaaaaaggaaacggacaggtggacagtgacttggtgatatctgggtccccagcttcagtcctgcctacagtgagctgtgttgttgggtttcccagtttatgtgagtgattcagctccttttgagcacaagcagtttgaattgggtttctgtcattgacaatcacaaaacacaacaaaacaaaaccatacctaatgcacatttagctgtataatttctactacgtcgaatttcacttgtttacttaatattatatacaggtttttacctaagacttatgaacatttttatagtttataaaataatcttgtatttacatatcacttaattttaacacaattatgtgaggtagggcatacatttttttttatttagtaatttttttttttttgaaacacagtctcactctgctacccaggctggagtgcagaggtataatcatagctcactgcaaccttgaattcctgggctcaaaggatcctcctgcctcagcttcccaaagtgnnnnnnnnnnnnnnnnnnnnnnnnnnnnnnnnnnnnnnnnnnnnnnnnnnnnnnnnnnnnnnnnnnnnnnnnnnnnnnnnnnnnnnnnnnnnnnnnnnnnnnnnnnnnnnnnnnnnnnnnnnnnnnnnnnnnnnnnnnnnnnnnnnnnnnnnnnnnnnnnnnnnnnnnnnnnnnnnnnnnnnnnnnnnnnnnnnnnnnnnnnnnnnnnnnnnnnnnnnnnnnnnnnnnnnnnnnnnnnnnnnnnnnnnnnnnnnnnnnnnnnnnnnnnnnnnnnnnnnnnnnnnnnnnnnnnnnnnnnnnnnnnnnnnnnnnnnnnnnnnnnnnnnnnnnnnnnnnnnnnnnnnnnnnnnnnnnnnnnnnnnnnnnnnnnnnnnnnnnnnnnnnnnnnnnnnnnnnnggatcctcctgcctcagcctccagagtagctgggactacaggagcaggctaccatgcctggctgatttttttttttttttgagatccatctcgctctgtcgcccaggctggagtgcagtggtgtgatctcggctcactgcaacctccacctcctgggttcaagcaattttcctccctcagcctcctgagtagctgggattacagtcttgcaccaccatgcctggctaagttttatttttatttatttcttttttgagacagggtttcactcccattgcccaggctggagtgcagtggtgtgatctcagctcattgcaacctctgcctcccgggctcaagtgattatcctgcctcagcctccccagtagctgggactataggcatgtgccaccgctcccagctaatttttgtattttttttagagatgaggtcttgccatgttgcccacttggtctcaaactcctgagctcaagtgatcggcccacctcagcctcccaaaatgctggaattacaggtgtgagccactgcgcctggcctaattttttattttttgtaaagataggatctcattatgttgccctggctggttttgaactcctgggctcaagtgatccttctgccttggcctcccaaagtgctgagattataggtgagagccaccgtgtccagccaagaaatatattttacagtaaccccgtacatacatacacacacacgcacacactcttaaagttgcacaaaacaatacctaccttagtgcctgtgacattctctgatattttctattctattttttaaaaattctggctgggcgcagtggctcacgcctgtcatgccagcactttgggaggctgaggcgggcagatcacaaggtcaggagttcgagaccagcctggccaacatggtgaaaccccccgactctactaataatacaaaaattagctgggtgtggtgacggatgcctgtaataccagctacttgggaggctgaggcaggagaattgcttgaacctgggaggcagaggttgcagtgagccaagattgcgccactgcattttagcctgggtgacagagcaagactctgtctcagaaaaaaaaaaaaaaaaaattctgttttatttcagcactttggaaggccaaggcaggtggatcccttgagtcctgaagtttgaaaccagcctgggcaatatagggagaccctgttttcttgctgtgtccaactacctagaacaaccattgagtcaggagaaagaattatggatctcctgcccagggacccagatgaaaggtctctttgcttcagggctctcttaataaaaaaaagaaaagaaaaaatattctggttgcaacctacagttttttttttttcgctggaatgaagtggtgccatctcagctcactgcaacctctgcctcctgggttcaagcaattctcctgcctgagcctcccaagtggctgggactacaggcacctaccaccacacccagctaacttttgtatttttattagaaacagggtttcaccatgttggccaggctggtcccaaactcctgagctcaagggatcttcccgccttggcctcccaaagtgctgggattacaggcgtgaaccactgtgcctggccgcaatccacagtggttttttttgtttttttttttaattttttttttcagagacagggtcttgctctgttgcccaagttggagtgcatttgcatgatcacagttcactgcagtcttgaactcctggagttttctgttcttctgtgactaccctatgttattcttgtctcaattttttaatggaagggaattgtttaaggtgtacaagatggaggtcccaatatggtgtggtggttgagtcttggctcgtgggtctaacagatttgtgttcaaagcctggctttgccactaactagctgtgtccttaggcaaattatactccaagtctcagattcctaatttgcaaaatgagaataataataaataatacttcctgccccattagtttattatgaggattgtttttttggtagagtcatggtctcgctatgttgcccaggctgttttcaaactcctggcctcaagtgatctgcctgcctcggcctcccaaagtgctgggattgcaggcgtgaatttttgtgccagcctactacaaggattaatgcttgtgaagtgttaaatatagcgtttggtacacaataaaaattcaattaaggttgtcagttactcttaagtataaattggggaccaagaaggcaaaaatggagtgtgttttttgcagatggacggaggggagccaggacacagctcagcttgctcatgctcagagagttaagctgctgaccctgaaggcagggggcacacaactgtatgtgggagccagactaagcagtcgagacagggcagacagtgtgagaaagctgttgatgagagctgctgctgaataaaatcatctttcacctgtctacagctccccaagtgttctttctgctcatccacccactacctccggacctcaacatgacctttggcgtagtctaaacctgacactcataacagttacagatttctttgtcccttctacactcccacttttttgagacagggtcttgctctgtcgcagaggctggagtgctctggtgtgatcacgacgcactgcagccttgacctcctagcctcaaatgatcctcccacctcagcctcccaagaagctgggatgttccacaggcacgttccactacactcaggtaattttaaaattttttgtagagagggggtctccttatgttgcccagggtaagaattcctaaactcaaataggctttttcctgccaagactttagttcgtgggtgattttacaggtgcttctattttcccttcaagtggaacaaattggcccccagtccaatctgcagagacagctttgccttggggaagttacctgatgtagaacaaggacaggagacaggtcaagttgtagttatttgactttcgtgattaagagagccctgaagcaaagagacctttcatctggatccctgggcaggagatccataattctttctcctgactcaatggttgttctaggtaggaaccagaaccacttgctggaagcctgcattgacttatttgaatcgattactgcttttctttcttttccattctaagctattatgtttttatggtactaagcagattttcttgaaaacttctagaaaactgcctgctacctgcaagaaactgttttcttctctcctgtattttacgccaccccaatgcttctcctatgcagctttgtcgtctaagttatttccctgaggcaaaatttccccattctttcagctcccctcctcccagattgagaaattctaggcttgccctggacttctgtcttgtagtctctgggtttttttcctttctttttcttttccatcaggcaccaagtccggagtttgcgtggctctgatgtctgctcgtggatcactgattgaccaggctgaagccagagggtcctttagatccsgagggataatagagcaggcagcatttccacccacgttctgagactcctcataattgcctcagtgctgcacgtacctatatggaaaatacaagtgcactgtcaggcttggggttaatggtttcacctcacgtctcagaggagcagagtcctagtgcacctgtggagcctgaaccagctgcactccaagaggagcagagaagggaagcaatttcttactccacccctttcaaccactggcactcacaggcttgccacctactcttgctcctgccaaatggtacagagatgaaatcttagaataaaatttttgaactcaataaattgttaattaatatctaggagtggcagatatataatgcttctcttttcacgacaggtcaaagatgaaatctgattaggctttggagggcgtggtttgcctcttgaaattccttgctcgtctttagaaagctgtgttgcttagagcacccaaaagtgccctttatctaactgagggaggcgcacttgtcttcatatatagaggcaggagctggcattgggaaagtcaaactagttctgcaccatgaggaagaagcagctgaagacggaggcagctccacactgtgaactaagtaagtagcccagggaagctgcccagctgagcagacctgaaagggtgacaagtacagctctagcaattttattttctagttataatagaagttgccaaaggaaaggttccgatctggaggaacttcatcaaacctttctgaaactccacagatgtactgtagcgagaatctcagaactaatttgtgcattttcttttttctccaggagaaattctgtatgaaaaccaacctgctccaggaagccaagcccccccsccccttttttttggtccccgagtttgtttttacttcgcactttatttggatttttctctttgcagttcacgctcctttcctcwtttcttggtctctcttactaatgaaattttctcctagctgtttttacgtgaataaagaagctcaattacctttaatgctgtaagcagtgcgaggggtcggggagtgagggtggcgggaggatctaatgtttttggtggctgtaaacgacattgcagaaaattacggtaatttgttaggccatttattccctcttcaccagtttggcagtctcatcttcagagcaaaagatacggtgtgaggctgaaactggcgatagagtgggattgcttttgggtaggtaggatgaagtctggggagaatcgagtcagctgggcgaggaggaaaacaattcactacggaggcttgggaggacacctaaggcggtcaaactggctgcactagctgatgtttctcggttcctcccaggtgtggggtgctcttggtggggcagcagatactatgatgtggctctgggggcgcgaggaaatgttccttccaggtggctatcctttttttttgagacagggttttgctctgccacccaggctggagtgcagtggcacgatcttgtctcaccgcagcctccacctcccaggcccaagtgattctcccacctcagcccccgagtagctgggaccacaggcgggcgccgtgatgcctggctaattttttttttttttagacggagttttcgctcttgtttccaaggctggagtgcaatggcgcgatctcggctcacygcacctccgcctcccgggttcaagcgattctcttgcctcagcctcccgagtagctgggattacaggcatgcgccaccacgcccrgctaattttgtatttttagtaaagacggggtttctccatgttggtcaggctggtctcaaactcccgatctcaggtgattcgcccgcctgggccctccaaagtgctgggagtacaggcgtgagccaccgcgcccggcctttgcttggctaattttaaaattttttgtagagaccgggtctcactatgttgcccaggctggtatcgaactcctggactcaagtgatcctcccgcctcggtctcccaaagtgctgggcattacaagtgtgagcctccgcgcctggcctggctaccctttacaggatagagctatacctcgtagcttgattgtcagtacctaacgtggcgccacggcgaactagggcaggaatcttatctgtccccagactgctagcggactggagctccccagtccaggggctgtgtgggtctggccaacgcaagcagcaactaggcagcatgcagctcccgccgggtgccccaggggccgccgsgtgccccaggggccgccgcatccagactccgcgtgggcggagcctaggtccctggtctgcgggccacgcatcccggccgctgcagggactccagccaatagggatgtgcggctgccgtcctgtcgaccaatcgcggggaggggagggcgttagccagcktggcgctggctcccggaatatggagccctggrcgcgggggcggcgtgtcaggtggttgcggagctggtaaggtgaggggaaggcaaggtcaggggtcacggcattccgctcgctggcagggaggggcgcggggcggctcgagggcctgtgtcgggggtcaggctccggggctaggatgcgacaccggctcgccgtgcggggctgtgaggggaggtgtggccagggagggcctcaggcccagagtccaggactgatggagtcgcgccattcagagaaagacccaaagatgggggcagggagggaacgccggaggtcgcgggggtctcgccccttccccgccgcggcctaggacacatggcccagctcccagctgcaccggatggcgcgcccggcctgtgtcggggtgcgctgacctgcttcgacgcctcgaaagaggccgacgggcacagggcaaggtctttcgtggcctcttcgtcggcgccgcagggggccgggctgctctccggggcctcccgccgccccgcttcaacaaaagactcattrtaacctaaccgacttcagggagcgccttctgtgtgaatagcctgcatacgcggctcagtaattgtgggtagattggttttaaggctgtttgtgtagctctcagggaccctctggattccaggctccaatgagcagggtttttctacagggggatattgcacatatgtaagtgggctggatggctctcccagctgtgcgtttcatgtgtccccacttttaaagctaccgcttaaatgtgayatctcttgcaaaagcaaaaattatatggaaggagagtttgcaaggggagataggcttctaaaaacttgctggcctcaattttagtgactgttggtgaaaaatggagaagctatgtttacaytgacttctggaacccgaagccccaccagttcgcatgatttcttggctttgtaaatctttgagcatgttgtttgcctctttcttcttttgttccacgtacttaaaatggggattgataatatcagtcttacagggttgttggtatgaaattagttaataaacaacaaagtacttagaactcttgatgtggaggagtttttgttgttgttaccttctttccccttaacacttstaaagaattctaaccttattacttattctttgctcagagtctcatgacttatcaccagtgaacccgccggcctatactttccattgacatcattaactttgatctgagggtatagtgtagttatatgtgactagaggatttctgctgcgtgtttgttttattaaatacggttggaaactatcattatactaggtcatttattgtgatacctgtgttgggtaaatgaaacctgaaaccttcggctgtttattttttcattggacagtatttcattgacagtcttgcttggcctactcagtttattttggagccagtactaaaaaggccatgattgcagcatacttggtttctcatgtttccggaatggcagtgggactcgggaggggaatttctgggtagcctggcagcacttcttgttaaggaatggggaagcttcttatgaatctaatcttactctaatgttaggaaatcagcagtggtcccttggattactctacaaagctagtaggcagctttggttcagttatgactcagtgaaggttagagaattatatctacaaagtaggatctttttctttctttctttcgttttttgatacggagtttcgctcttgttgcccaggctggaatgtaatagcgcgatctcggctcactgcaacctctgcctcccgggttcaagcgattctcctgcctcagcctcttgatgcctggcgaattttttttgtatttttagtagtgacggggtttcaccatgttggccaggctggtctggaactcytgacctcaagtgatccacctgtatcggccttccgaagtgctggggtggtgtgagccaccgcgccctgccagatctttcttgtttgactttcattgctaagaatttgggtgagtgttgttgaatcaaagacatctttattctctgcctcctcaccatgcacatacgtacaaatgtctgctgacagatatctgcccttcctatggccttaaaaagccttctcatattctcgtggtgctatctgggatacaccagtggaagactgctttgtcttctaattcttcccttcaaagaagcggctatttatacacatagcattattaggaactagtcagaaaatgagaaactttaagtttatgaaaaaaaacattgcttacttcagctgcatgctggccaaatttagttgaagtgcagttggtataagtttagttgtttagttttggaayaagagagttcaagacttcccctcccaccccccacaagacaaggtctggcwctgtaacccaggttggagtgcagtggcatgatcacagctcactgcagggttgacctcccaggctcaagtgattctcctgccacagcstccctagtagctgggagtacaagtgcatgccaccacccctaatttttaaaaatttttttgtggagatggagtcttactaggttgcccaggttgtcttgagcccctgggtgccagccaccgtgcccaaccagtttaatacttctttaggatttaaagttggaagttggcctggtaagagtgaaggacaatgtctttgtaatctgtttttccctgagaggcatgggaatgacacctttaaagaactgagtgtgtttgaggcagaaagggaagtctgctgccctaatattgtcattattatcatctctctgaggctctgtagtttgagtaaaacattctgggaaaaaaggtaggggcatttgaatgagcggaatataatgaattagaagatgcagaccatgtctcacttactkgctgccatttattctttatttttatatttttgagacagggtctcgctctcttgcccaggctggagtgcagtggttcagtcttggttcactgcaacctccacattccaggcttaagcgatcctcccactagagcctcctgagttgctgggactacaggcttgcgccaccatgctcagctaatttttaatttttttgtagagttgagttctcactatattgcccaggctggtcttgaactcctaggttcaagcaatcttcctgccttggcctcccaaagtgctgggattacaggcatgagccactgcgcccagccttgccatttattctttttataatttaacaaatatttatggagcaatttacattaattggccccttgagacacaaagaagagccttcaaggcatcatcaggaatattctagatacaataaaatgacatgtatataataaggtatattttaatgaaatcataatggaatataaaacaattggccagcaatgatcaaaatggcctaacttctcttccacttttaatttcaggttaaagtaatttatattttttggcataaggaacaaattagggtttttagtcttgttttggtgcttattgccgataagtcattttgtgtcaggtttgtgtttgttttggtctcatctctactaagctgatagctgttaaaactcctaggaaatgaaagaagaaagctacaagttaattattaaaactttaccaggtttcraagagcagaaagaggcttgttaaaggctggagaatcttgtagtatatattgtcttaatttttctttgcttttaggaaaagaaacttggaggacaatatttacttaaagttgttaaggtcaatctacatcatttgggagccaatatccatcattaggaaaaatgggttgaatgtaatctaatgaaaattcttcatatttgccagagaaaagctacttaagtgtgaggacaaaacatattttytgaggcaagaagtaggtataggctggtttaataggggatttttttttttttttttggaaaaaagtaatttttttttttttttaatggagactgggtttcttgctatgttgcccaggctggtctcaagcttttgggctcacgcaatcctcccgcctcagcctcccaaagtgctaagggattacagatgtgagccaccatggccagtctaatagggaattttcttattccaatagaaaggggtctttgaaattgttcacagagcttggcattgtgttccatgatagaggtgtcagatcaggaggccaggtttgtcccccaaaaggaaacacactgctgtaaacttctggttaggaggaagtttakaggaagctcacacagagttgggaaraacaaagacgaagctatagtcactggaagtaaractttagtgaccctgacttgtgagcattcagggagatttggaagctggttaagcctcaaragtgctgatgggagaaggtraagagttgtatttaatgggtaccagccccttctaattctgatgtctctggttgatgtgtgatatttttgtttaaaagataagtactccttgacagcctggccacatttctcccaactgttatcgtttttsacacccaggcagctggtttcattatcagctgtactcttcctccttacatcttcctcccccctcctcttcttgcttcctaacattttctccactttctctttttcttttttctttatcttaagatggtctcaatgtcaggtttttcattcaactacaaaacacttaaaagtccagctcaggtgagaaacagcaaacttggtgttgagttgaagttgtggttgtctttttttttttttgagacagggtctcactatgtcacccaggctggagagcagtggtgtgatctcagctcaccgcaacctctgcctcccaggctcaagcgattctcctgcctcagcctcccaagtagctgggattacaggcacgtgccactactgcctggctaattattgtatttttagtagagatggggttttgccatgttggcaaggctggtcttgaactcctgacctcaaatgatccacctgcctctgcctcccaaagtgctggcattatgggtgtgagccaccgcgcctggcccgaaattgtggttttgtaagttaaataggatgtctccaattttgagattattactagggcatgcaaagtatggtttggtrtctgtaggggattggttccaggacctcactcacatgcataccaaaatcctgggatgatgcttaagtccctataaaatggtgtagtatttgcatttaacttatgtacatcgtcccatgtacttaaaatcacctctagattagttatatcaattataatccccctctttttcttctagacagggtctcgctttgtcatccagcctggagcgtagtggtgcaatcatggttcgctgcagctttgacttcctgggctcaagggatcctcccaccttagcctcctgagtagttgggaytacaggagtgtggccatcacacatggctaattcttaaattttttgtagagacaatgtctcactatgtcgcccaggctggtctcaaatttctgggctgcctcagcctcccaaagtgctgggattacaggtgtgagcaactgcactgggtctataatacttaatacaatgtaattgctatgtaaataattgttctgtattgtttagggaataataccaagaaaaaartggtgtatatgttcagtacaggcacaagcaaccgttttttcccccaaatctttttgatctgcagttgtttgaaaccacaaatgtggaacccagggttacagaggcctgactgtatctcagtggccattatgccagagagagagagagagactggttcatgttaagcgcattgtataatagcagctctgtttgtactttataaactgagtgtgtttgtgtggcttttggttgaagacattctaatattacccacttgagtagaggggattagagttttgaggcctttttctaaaatgwatacttaccacaggggcttttcactgtttaccatgaagtacacataatcagtcttcaacctgactttttttttctgtgtatcattttatatcaaattcattttaataagaggaaaacaggataaacttactccagtgtaaaaaataatacctcacttgagcccaggagtttgagaccagcctgagtaacatagcaagaccccacctttacaaaaaaaaaaaaaagccagctgtggtggtacgtgcctgtagtctcagctacttgggaacttgggaggctgaggtgggaggatcacttgagcctgggattgtgcaactgcactgtagcctgggaggctagaaatatgtaaataattgttctgtaagaccctgtctcaaaaaataaaataaaaaacaataccagactttataccttcaagaacaatttggaaattcacatgtctattctaagctgtttctttccccacacctcgaatgggagcagattgagttttagaactaattgggctgggcatggtagctcatacctgtaatcccagcactttggaaggctgaggtggatggatcctttgaccccaggagttcaagaccagcctgggcaacatggtgaaaccatgtctctacaacaaatacaaaaattggcagggcatggcacacgcctctagtcccagctacttgggaggctgaggcgggaggatcacttgagcccaggaggttgaagctacagtgagctgagaccacgccactgcactccagcctgggtgacagagcaagacactatctcaaaaaaaaaaaaaaaaaaaaagttggatggatatttttgatagactcagaaaatgctgcttcttcatgacctagaatggaaaaatagagggagagtaataatctcttattttaaaaaagtgattaataaccttcctcattaaaatacatagggttcagaaaataattagctctgtttgagctgctagaatatttcagaaasttttgttgactgtcagtcatccaaatggcaggagcccaccttcatgaagagcacctggtacaacaaggtgttgtgttaataatacagtaatggtttagtagaactgtcaagtactttggccttgaagtagaccattagggaaaagagaattttagaagaatctagaaaccttttcattttctttaggacaaatataatttttttaaaaaatgagaattctttgttattctctaataaacactttgggtgtcgctaagccttgatctgtgcacctagcagtttctcttttgtcactagcatgtctctggcactgaacagtgcctgaggaagaatgaactgaacagtgtcaagaggaagaggtggctttgccatgtagcttgaacgcattcttgctagcatttatttcatcagttacttccatgaagacacctttctggctgcttctatgaaagttttttcctatttaatgttgtctttgattttattgagatgaggaaggtgatgaaaaaaaaggaggaaagaattaagggactgtatttaaaaacattcctctctaaacctacaattaattttagggagaccttttcagctgtaagactagtgaaatggttttgagtacctttattctctataggggaattttatatgaaaacgaattatttcaaacccaaactatttatttatttatttatttgtttatgacagacagggtcttgctctgtagcccaggctggggtgccctgatcayggctcactgcagccacaacctcccaggctcaagcagtctgcccacctcagtctcccaagtagcacgcactaccacacccagctaatttttgtatattttttgtagggatggggttttgccctgttgcccaggctggcattgaactctgctcgcctyggccttccaaaatgmtaggattacaggcttgagccaccgcactcggcccaaacttttgttttaaccgtagattaaaaaaaaaaaagttgaagttgtatatattaatactcagtatttcaaactttcttaggggcagttttctgttttgtgttttttgttttttttttgagatggggtcttgcttggttgcccaggmtggagtgmagtggcatgatctcggctcactgcaacctccacttcccaggttcaagcgtttctcctgcctcagcctcccaatagctgggattacaggcacccacaaccacgccyggctaatttttgtatttttagtagagacggggttttgtcatgttggccaggctggtctcgacctcctgacctcaagtgatccacccaccttggcttcccaaagtgctgggattacaggtgtgaaccaccccacccagccaggggcagtttttaaaacaggtttgggctatccaaattgttcttccagagttcttataaatgctaagagaatatacagaattactgttaattagatgttagaatttattatagctagtatgtgttttggggggtaacttaattttcatataatttcaaacttgcagaaaagttgtaagagtagtaccagggaatggacaattttcaagaaaatgacagtggtaagcagtgggtgccttgagggaacacggagaagccacttaagccaaattagggagtcaggaatgctttcctgagaggggatttttaatattttrcatttaggtggcactaagacaaactagtagtaagttaggctgaaggcaataaatacctgccaattagacagctgtagacttctgattatctattgcagaagctttatcagagagttcaactgaacatccctaaaatgtttgttgagaagctgagtgaatctatatgaccttgacattttttataaggcwaataatacatgtatctggtaaaacttctttttatgtgcaaaaggtatacagtgtatattcagtgagaggttttcccttcacatgacctcatttgggctctcctactccttccttctctcagggatggcctttattaccagtttttggtgtgtcctttggagattgtacgtgtacgtgtgtgttttctcttttttctttttgctacatacatgatagcatgctgctcaacaaattggtcttttgacttgacaacatgtaatattttagagattgtatcctatctatacatgatagatcgtcttatttatagtggttgcatggtattctgtccaatgaatgtgcacagtttattcaaccagtcctctactaatatcaaggttgtttacagtcttttcatactacaaacaatgctgtgggaaatatccttgtacatatttccttgatgagtactttttgctttttttttttaaagaatacatttttaggagtaaaattgctagatcaaagaatatgtagacttttgaaattttagacagaaaataaaattttgttagcatttttatcttgtaaaacagtcttacaacactttttttttgagacagggtcttgctttgtcacccaggctggaatgcagtggcctgatcarcactcactgcagccttgacctcccagactcaggtgatcctcccaccttagcctcccgggactacagacgcccaccaccacacccaactaattttttttttttttttttttttttgagacagagttttgctcttgtcacccaggctggagtgcagtggcgcgatctcggcttattgcaacctccgcctcccaggttcaagcaattctcctgcctcagcctccccagtagctgggattacaggtgttcaccaccacacccrgctaacttttttttttttttttgagatggagtctccccctgccacccaggctggagtgcaatggtgcgatctcaacccactgcaacctctgcctctcaggttccagtgaatctcctgcctcagcctcctgagtagctgggattacaggcatgcgccactacactggctaattttttgtatctttagtaaagatggggtctcaccatgttggccaggctggtctcaagctctcgacctcacgatctgcccgcctcagcctcccaaagtgctgggattacaggcgtgagccactgcacctagctttaatttttgtattattagtagagatggggtttcaccatattggccaggctggtctcgaactcctgacctcaggtgatctacctgcctcagcctccgaaagtgctgggattacaggtgtgagccaccgtgtccggcctccacctagctaatttttgtatattttgtagagatggggtttctctatgttgcccaggctggtcttgaactcctgggcttaagcaatctgcctgccttggcctcccgaagtgttaggattacaggcatgagccactacagccagccagtyttacaacttttgttagagaatgggataaaataggctgggcatggtggctcacgcctgtaatcccagcactttgggaggctgaggtgggcagatcacaaggtcaggagatcgagaccatcctggccaacacggtgaaaccccgtctttactaaaatacaaaaattagccgggcatggytkgcatgcgcctgtaatcccagctactagggaggctgaggcaggagaatgggataaaatagtcatattacatttaaccatgagtgccattttttttctgtcaattgctgttcgataggaagaaacttaatgggtttaagagaaggtgacactttatggttaggggtaagctggaatatcaaagcaatgttaatcataattgtgatggttacttatcaaagtattgctgggttgattctagttgtttgtgtcctaactctggatcttttccttaatgtgacgaagtaactgaaacaacctggtgctacagccctggagagcaaaactgtcttaatattaacttactgcttccatatgggtcataaattttcatggagacttgaatgctgtgcataactggcctggccctttctattcctccctagttttttttttttttaactatttaattatttattttttataagatggagtcttgctctgttgcccaggctggagtgcagtggcgcaatctcagctcactgcaacctccacctcccaggtttaagcgattctcccgcctcagcctcctgagtagctgggattacaggcatgcaccatgatgcctggctaattttgtatttttagtagaggcggggtttctccatgttggtcaggcttgtcttgaactcccgacctcaggtgatccgcctgcctcagcctcccaaagtgctgggattacaggtgtgagccactgcgcccggcccctccctagttttattaattttttttttttaatgagacggagtcttgctctgttgcccaggctggagtgcagtggtgcaatattggctcaccgcaacctccacctcccgggttcaagcgattctcccgctttagcgttccgagtagctgggattacaggcatgcgccaccacgctggctaacttttgtatttttagtagagatggggtttcaccatgttggccaggctggtctcgaactcctgacctcaggtgatctgcctgcctcagcctcccgaagtgatgagattacaggcgtgagccaccacgcctgacctcttttattttattttattttattttgagacagagttttactctgtcgcccaggctggagttcagtggcatgatctcggctcactgcaacctctacctcctgggttcaaacgattctcctgcttctgccaccctagtagttggaattacaggcacctaccaccacgcctggctaatgtttgtatttttagtagagacggggtttcacccatgttggccaggctggtattgaatttctgacctcaggtgatccgcccacttcagcctcccaaagtggtgggattagagacgtgagccaccgcctccggccccaagttttattctgtaggcactgtaatgaaacatgtagtttgttgactaaaagctttgttgaaaaggctggagactggaatctagaatttgttttctttcttgaaataattcattcttgagatttcagatagaagacgaaactttttgtatttgaacggctctgtatgtacttggtataggaatgaacttagaatatcactaataattatttaaaattttatcatgaaatatttctgtctaaaaatatttgcagactacagtcctgggaagatcacgctattaccttaattgtttgcttttaaaatataacttaaaagcctattttggtgcttgcttcggcagcacgtatactaaattggaacaatcaagagaagattagcatggcctctctgcacaaggatgacacgcaaatttgtgaagtgttccatattaaaagaaaaatttttgtccaggggcagtggctcatgcctgtaatcccagcactttgggaggccgtggtgggtggatcacctgaggtcaggagtttcagaccagcctggccaacatggcaaaaccccatctctactaaaaatagaaaaattagctgggtgtggtggcacgtgcctgtaatcccagctactcgggaggctgaggtaggagaatcgcttgaacccgggaggcggaggttgcagtgagccaagatcgcaccactacactccagcctgagtgacggagtgagactccatctcaaaaaaaaataaaaacttttaaggcctgttttgcctattctggataaaaatcttcctcagatgtagacgagacatttctgtgtcttctttttcttcttttttagacaaggcctcgctgtgtcacccaggctggagtgcagtggtgcgatcatggctcaccgcagccttgaccccagggctcaagcagttctcctagttcagtctcccaagtagctggcaccacagacatgcactaccacgcccaggtgattttccagtgccttaaacagtgcccagctgattttccagtgccttaatgatattaatcatcattacaaaagtgatttacagcctggccaacatgatgaaaccctgtctgtactgaaaaaaaaaaatacaaaaattagccgggctcggtggtgggcgcctgtaatcctagctacttcggaggctgaggcaggagaatcacttgaacctaggaagcagaggttgtagcgagctgagatcatgccattgcactccagcctaggtgacaagagtgaaactctgtctcaaaaaaaaaaaaaaaaaagcaatttaattcattcagctcattttgatcagggccacaattggaaacttgagttattatacttgcagtaatattctcagaactgattgacgcataaggaaggactgtttgcctcatatcaaatagcccaagactaattgatgtacttgagttttttgattcytcagtgtgccaagttcctcttttcctggaagagctatgcatagttccagatctgatttgtggtttccaatttattgtgggttaagacaatctgataacattagtttgttacaattatatgtaaaacaaaagtaaaaaggctttgccgggaacgtcggggctgtgctgtgattggaatccaagtgagtmctgctactctgagtggtcaaatatttaaatcccatttaggtgaggtgctattgtcattgactgaaagaggggttgaatttagtcagtattattgggggctgttggctgatgtttagtcatctggtggcttaaaacctgacaggagacacatggctagttgtccgttgtaatataatacttggcattggtgactctagagaggaaggattatgttttccaaattagcaggtggtggtatatatgccccagaagacagatgaaacctaaaaagaaaagaaaagctcctttctggtctgaattctgtaattctataagtacagaatatgttggtagatagaaagattacccaaaacctgaaacagcaagtagaagattgttcatgtaggaacaacatataagggacaagggtggaaaaaagactagatttaagcagtaaaagatcattaagcgaggcttcatcacttcttcagtaggacagttattattgggattcaaagaggggcttatcaatgaatactatgttgtccttccccttctaaatttgaaatcaactgagaagtagataagaagattgaaacatttttttttttaatagccttattggtaaggctcaatggagaatatgccatagatctgttcccaagtgagcttgctaaaatcctccctcccaattaaacttaacaggatgatggacatctggaacttccaccccacccctgactccacccgccccactgcgggttgcttagtacaggacctgtagacaaaggctggcatcccacacgctatgcttaatcctgctggtgcttcagctctcttggagagcttgggaggggctgggccacgggtgactagtttcttctagttgtcagagggttgaggaatgaggtctagaacattatggctgcagactttactttcttaggaagatttgaggctgccaaatagtggccttccactaccagtatgcttgtatggtgctttttcctaccctttctagaagattgaaccatgagcttaaattacatattttagaccaaagagaattacagatttctgtccttaaaaactcataaaataggctgggygtggtggctcatgcctgtaatcccagcactttgggaagtggggtgggcggatcatgaggtcaggactttgagaccagcgtggccaacatggtcaaaccgtgtctctactaaaaatacaaaaattagccaggcatggtggcacacgcctgtaatctcagctattctggaggctgaggcaggggaatcgcttgaacccaggaggcagaggttgcagcgagctgagattgtgccactgcactccagcctggacaacagagtgagactccgtctaaaaaaactaaaaaaaaaaaaaaaaaaaacaactcataaaatagggggaaatgtgtctggctttagacacttgggataatttggaggcaaaggcagagaatggatacttgcctagcagcctctgtgtagatgcttattaaaaaagtatttgcctggccaggtgcgttggctcatgcctataatcccagcactatgggaggctgaggcgggcggatcacgaggtcagcagatcgagaccatcctggctaacacggtgaaaccctktctctactaaaaatayaaaaaattggctgggcgtggtggcgggcacctgtaatcccagctacycgggaggctgaggcaggagaatcacttgaacccaggaggcagaggttgcagtgagctgagattgcaccactgcactccagcctgggcgacagagcaagactccgactcaaagactcaaaaaaaaaaaaaaatggtatttgctgtctcactaaaatacctcctgttcaatttgtccaccaccccctgccatccgtgaagggtttcacagtgaaagccagaaagcctgctagacacattctaaaagagctgtaacacttcaatttggttttgaagtcttgccagcaaaatcttgactaagacttttctttttttgttaaatatctgtcagtcatattctgaaaactgtaattattttcaagrttacctaattcagtagaaaaattactcttttcatagtaaggattcagtcatacagagtaacaaactgctggttctgaacttgttagtttgttcttcctaattcttctccctcacttttctcctttccagaatcatattctaagaactcagccactcaggtatccaccatggtgctgggtcctgaacagaagatgtcagatggtaatttaccrctttgtgttattgtctaattttatttgtmattaggtttatgttggtaacagaaatttatcatatttttcctcttgtcatcatctgtcatcatctattctaacaactccattcaaaagtcaccatctggtgacttaggctgtaaatgaaaatggattttttttttttttttgaggtggagtctctgtcacccaggttggagtgcagtggcacaatctcggctcactgcaacctccgcctcatgggttcaagtgatgctcctgcttcagcctcccgagtagctgtgactaaaggcacacgccacaatgcccggctaatttttgtatttttrgtagagacagggtttcgccatgttggccaggctgttcgcaaatgcctgacctcaagtgatccgcccgtctcagcctcccaaagtgctgggattacaagcatgagctaccgcgcccatcctgaaaacagaatgttttttttttgtttgtttgtttggttttttttttgaggcggagttttgctctagttgcccaggctagttagtgttcagtggcactgtgtcggctcactgcaacctcygcctccccggttcaatggattctcctgcctcagcatcacgagcacctgggattacaggcacctgccgccacgcccggctaatgtttttgtatttttagtagagatggggttttgctatgttggtcagggtggtcttgaactcctgacctcaggtggtccacccgtctcggcctcccaaaatgctgggattacaggcatgagccactgtgcccggmcctgaaaacagatttttaaccagagacctgcttcrtatcttttttacaattctgagttgagccaagattagctgaaatttggtttctggcagtaatgcttgcaagggcaatgttattcccagacccaggataaaaacctctggagtgttttggctacycatgatgctycctggtgtttcagatgtgtatggagcagtaaaatacagggcgagtaccttacgctctgtatttgattggagcttcttgagtgctttgactattccttcctaaatctgagcttctttggaatttctgttccttttctataaatttcttcattaattyaaagctgcttaattaagatgatatgagtcagctccctatggaaagaaagctcttatttgtttaaattagaggttgtaaggatttattgcaaacacagagattagagctttgtgattcaaaatagccatttgatggctgaagcaaactaggctcygtgtatttctggcagggtatcccttttctcccagaccttctgcttcccaatatttaagattgactgcaaaatgcagaactcagggaaacgctgatatcagtctgagatgagccctgcyatcacgagggtgccagtaccccgtgaccggcggcactttactgcaagccttagtcagagtacaaagggttcctgcttggtggttttgctgcagcttcagagtttagcctgaactgtggcaggattttgtaacttgcacattttttgagaagtctgatggaggtataatgtccacggtcgattmtttgagtaagtcctaccaaatataggaggtggggaggacatttcgctagacaggcctagttcttttcttttaaaagctaggattttaggttaccaggagctggtctgggaatatgatattttgagcccatatgtcagtgtttttagaggaaaatgaaatggctctaaaaattcccaagtaggagtagaagtgtggaagtaggaaaaccattgtgagttaaaactgatctagagaattgagtgactgggggagggggagggagataacttttttagtgtaggctaarttttttacttcctgaatttttaaccatgtgaatgtattacttattctaaaatgtacattaaaaataaactattcaaaataaattgagctagagtcaggttggtctcttgtgcatttagatattaaactatttaatttcagtatactaaggatgaattgttagtgtattttgttcattttttactaatttattttcaaatctgttaattcagacagtgtttctggagatcatggggagtctgccagtcttggtaacatcaaccctgcctatagtaatccctctctttcacagtcccctggggactcagaggagtacttcgccacttactttaatgagaagatctccattcctgaggaggaggttagtatcaggtccttggaggagaacactattgtctggggaaaacctgtgagtgaaagatctgctggatggctcaagttcagcagcctcaggtttaattttggctggcaatctctgaagactatatctatatatctatatatatatatacacacacacacacacacacacaccccatctatatctatctatctctgtctgtctgtctgtctgtcygtctrtcyrtctatctatctatctatctatctatctgtctatctaatcttttttacagacagggtcttgctctgtcatctaggctccagtgcagtggcacaaccatagcccactgtagccttgaattcctggggtcaagtgattctcccacttcagcctccccagtagctgggactatagatggcatgccaccatgccaggctcattatttttatttttatttttagagacagggtctcactatgttgcccaggctggtcttgaactcctggcctcaagctatccttcctcttgtttgttgatgaaaaagagtcaaactctggctgagcccaggctcacacctgtaatcccagcactttgggaggctaaggcaggaggatcacttgagcccaggagtttaagacccgcctggccaatatggcgaaaccctgtctctacaaaaaatacaaaaattagctgggcatggtggtatgcacctgtagtcccagctactcgggaggctgaggtggaaggatcacttgagcctaggaggcagaagttgcagtgagccaagatcatgcyatggtactccactctgggtaacagaatgagacctcctctcaaaaacgaaaaccaaaacaaaacaggccrggcgyggtggctcacacctgtaatcccagcactttgggaggccgagatgggcagatcacctgaggttaggagttcaagaccagcttggttaacatggtgaaaccctgtctttactaaagatacaaaagttagctgggcgtagtggtgggtgcctgtaatcccagctactcgggagactgaggcaggagaatcacytgaacctaggaggcagaggctgcagtgagccaagatcgcgccactgcactccggcctgagtgacagagtgagactctgtctcaaaaccaaacaaacaaacaagagtcaaactctgtaaaatgtttaaagaggtttattctgagccaaatatgagtgaccaaggcccgtgacacagccccaggaagtcccgagaacatgtgcccaaggtggttgggttacagcttgattttatacgttttaggggtcagaagttacaggcagacatcagccaatatatttaagatgtacattggttccatcaggaaaggtgggacaacttgaagtggggagggggcacctttcaggtcaaaggtggatttaaagattttctgattggaaattgattgacactgggtgcagtggctcatgcatgtaatcccagcactttgggaggctgaggcgggtggatcgcttgagcccaggagttcgagaccaaccagcttgggcaatgtgacaagaccttgtctccaagtaaaaaaaataaaataaaattagttgggtgtggtggtgcacacctgtggtcccagctactttggaggctgaagtgggagkattgcttaagcccaggagttcaagaccagcctgggcaacatggcaaaaccctgtctctacaaaaataaaaataaataaaaaaagaaattggttgaaagagttattttctaaagacctggtctaaaatgaggggctgtggagtgtctaaaatgaggggttgtgaagaccaaggtttttattatgtaggtgaagcctctaggtaacaagcttcagagaaaatagatgtaaatgtcttttatcagacttaaaaaggtaccggactcctagttaattctctccgggatcaggaaaagacctgaaaagggaaggagattctatatattctaggttttgctcataagagacagctttgcagggtcatttcaaaatatacaaagaaatatatcttggagtaaaatactttgatttctttcagggcctgttatctgtcatgtgatgctatgctagagtcaggttggaatttagcatgttattgctacaaggaatctgttttgtcagttttaagatctctggtttttgtttgtttgtttgtttgtttttgagacggagtttcactcttgtcgcccaggctagagtgcaatggtgcaatcctggctcaccgcaacctcctcctcccgcattcaagcgattctcctgcctcagcctcccgagtagctgggattacaggcatgtgccgttacgcccacctgtttttgtatttttagtagagacagggtttctctactaaagtgttggtcagactggtctcgaactcccaacctcaggtgatctgcccgccttggcctcccaaagtgctgggattacatgcaggaaccactgtgcctggccaagatctctgttttaatgctggtcatttgtgtctgaattccaaagggacgggagtataatgaggtttgtctgacccctccctcccatcatggcctgaactagtttttcaggttttctttggaatgcccttggtcaagaagaggatccgttcagttggttgggggagcttagaattttatttttgtttgctctcctcagtgtcccaagtagttggactataggcacacaccacacagcaccacacctggcttgtttcctttttaaaatggtggctcttgtcctttttgggaagtgtttgggcacagaggtactgatactgttattctggttttagaataagaggctgatggaacctgcaggtaagggaagagctttgacttggacagagaagtggccagcttcttaataaaaagtgggtaagatggaggtgaaacttggacacatgcaatatctgacattgtaaatccttttttcttgtgaggctggattttgttgcttcatatgtgataacagaccaattatatcagtagttcaatggtgatgttcagtttaatctcttttcctctcttgtacagtactcttgttttagctttcgtaaactctgggctttcaccggaccaggttttcttatgagcattgcctacctggatccaggaaatattgaatccgatttgcagtctggagcagtggctggatttaaggtgaacatctagtcctacccctgtccttttaagcacataatacmctctcacatccttttctccaccctgcatgttggatagtagcctcaggggctacatgcagatacttcattggcagtggctcttaygtgtaaagtactttccatttggtcttatttttatccacatagtttccttgaacaaaggagaaactacatataggagaaactgaggctcagaaaggtacaaggtgacttagcaggtcatgtgcaaaatctgttatagaactcaagtcatttgattcttgacctgggctcttttctgaatgcagtatttaccactcatgttgccaaacaactaaacaaacaaacagacaaaaactcagttgttcaatgagtgttacaggagattttgttcttcttagttgctctggatccttctgttggccacccttgtggggctgctgctccagcggcttgcagctagactgggagtggttactgggctgcatcttgctgaagtatgtcaccgtcagtatcccaaggtgagcaatgtattgtcctgtttgtctctcacccatgccataggaatctgtgtgtctggcggtatgtgctggcctcattctatagtgagacagtcaaggacttgggggtcagtggccctgaagacagacrgtaccaacggaaatactgtagctcctcctgctgccaggccatgttttccccctctttcaaaatctaacttgagactcgcatttcctagaaggttttcttagaaaaactgtgttaccattcactctggcttccagtatctagcaatgcccagcccaaggggaggaggatgctctctctaagcacttttattcatacctccatgttactccatcagtttgcattttatatatgttctttttttgtttgactttgccatcactttgaaaaagtaattttttttctttttagtacaaactatatgtggcaagatctttggatttgctaataattatttttcagtttcccctcccrccggggsctacactgtcctctgcagcttcttctggacattttgggcctttcttaccgttgcctaaggcaagaatgaacactatgtctggaagatatttttaacttagttttgtctcttgttttgtttcttttcctgggtgtgagcaaaaagtatccttatctgcttttcaaaaaaataaaaaaatcttgataatatccccatttactctgatgtgattattacacattttatgcctatatcaaaatatcccatatgccccataatatatacacctactatgtacccataaaatttttaaaaaacaaacaaaaccttggtaatttataatccttctagcttctttttctttctttcttcttattttttgagacggagtctcactctgtcacccatggtggagtgcagtgatgtgatcatggctcactgcagccttgacctcccaggctcaagcgattctcccatctcagcctcccaagtagctgggaccacaggcgagcacgaccacacccagctaattaaaattttttttttttttttttttgtggagatgaggtattgctatgttgtctaggctggtctcaaactcctgggctcaggcagtcctcccaccacagcttctcaaagtgctgggacgacaggcatgagccactgcaccragcctagcttctctttcttcatacacgttaatagttattttgtaataataattatatatatatatatttgtttgtttgtttgttttgttttkttttttgagacagaatctcactctgttgcccaggctggagttcagagttcagtggtgtgatctcagctcactacagcctctgcttcttgcagtgaggcgattccagggattctcctgcctcagcctcctgactagcttggattacagccacgtgccaccatctggctaatttttgtatttttagtagagatgaggttttaccatgttggtcaggctggtcttgaactcctggccttaggtgatctgccagccttcgcctcccaaagtgctgggattacaggcatgagccaccgtgcccagcctgcttttttgtttgtttgtttgagacggagtttcactctttcacccaggctggagtgcagtggcgtgatctcagctcactgcaacctccgccttcagtttcaagtgattctcctgcctcagcctcccgagtagctgggattacaggtgcctgccaccatgcctggctaatttttgtatttttagtagagacggggtttcaycatgttggccaggctggtctcgaactcctgaccttgtgatctgcccacctcggccttccaaagtgctgggattacagacgtgagccactgcgcctggccttgttttggtatttttgagatggagtctcactctgttgcccagcctggagtacagtggcgtgatctcagctcaccacaacctccgcctcttgggttcaagctattctcctgcctcagcctcctgagtagctgggactacaggcgtgcatcaccacgcctggccaatttttgtatttttagtagagatgaggtttcactatgttggccagactggtctcaaactcctgacctcgtgatctgcccgccttggcctcccaaagtgctgggattacaggcgtgagctactgcgcctggctctgccctttttttttttttttttttttttttgagaccaagtctcgctttgtcacccaggctcgggtacagtggtgtgatcttggcttactataacctcaacctcccaggttcaagcgattctcctgtctcagcttcccgagtagctgggattacaggtgcgcaccaccacacccagctaatttttgtatttttagtagagacagggtttcaccatgttggccaggctgatctcaaactccagacctcaagtgatccacttgccttagcctctcaaagtgctgggattacagatgtgagatactgtgcctggcctgtttttttgagataggatcttgctctattacccagactagagttcagtggcacaatcatggctcactatacccttgacctcccaggcgcaagcagccttcctacctctgtctcttgaatagttgggaccacaggtgtgcaccatgatacccagctatttttaaaattttttgtagagacagggttttgccatgttgmcaaggctgggcttgaactcctgggctcaagtaatcctcccacctctgcctcccaaagttcagggattataggtgtgaactaccatgggtgacctgacaaattttttggatgctagctatctggaggtgtttttttctggcttcagtgagtcagcataactaaatctgattttcagctgtattgtttggccagataagtttctgactttgttatatgccacccagttccaaccatcttcccttgagtccttttgcatacgtgggcattattattacattaaaggtgactccaaccttttctgttgttgtggtggtggtttgttgagacagtcttgctcttgtttgttgcccactctggagtgcagtggcatgatcatagctcactgcagccttgaccactggggcttaggctgtcctcctgcctcagcctcccaagtagttgggactacaggtgtatgccatcatgcctggatacttttgtactttttttttttcctataatttttattttaggtttggagatggatacatgtgaaggttttttctttctttctttctttttttttttttttttgtgaaagcaagtttattaagaacgtaaaggaataaagaaaggctattccgtaggcagagcagtcacatgtgaaggtttgttacatagataaacacgtgtcatgggggtttgttgtacatattattacatcaccccgatattaagcccaatacacaatagttaacttttctgcttctctctctccttccaccctcccccatcaagtagaccccagtgtctgttgtttctgtctgtgtgttcataagttcttatcattttgctcccaatttttatactttttgtagagatggggttttgccatgttgcccaggctggtctcaaactcctgggcttaagggatctacgttggcatcccaaagtgctgagattacaggaatgagccactgtgcctggtccaccccaaccttttttttttttttttgagatggagtctcgctttgttgtccaggctggagtgcagtggcgcaatctcrgctcactgcaaccttcgcctcccgggttcaagcaattctcctgcctcagccccctgagtagctgggattacaggcatgtgccaccatgcccagctaatttttgtatttttagtagagacggggtttcgccatgttggccaggctgatcttgaaccctgtcctcaggtgatccacctgcctcagcctcccaaagtgctgggattacaggtgtgagccaccgcgcccagcctgaccccaaccttttcatgtttgttttgtcttcccagctatggtcaggatagatatgttcttctgcaatcatttaatattctttcttgacccatatttggaccgtattagcatccttattctcctctaaactttttaggattgtttttaggaaattaagtggaagttagtaaatggcaattatattcttctcaagtagaaaggaaaaagaaaaaagtaagatcaattactgccttgaccttcgttcacaggttctgccacgtggtagcacacttttccttctccaggtgagagccacagtgcagtgatcggccaagtggaggcacgttctggtatttcttctctagtctggaggcttataaaggactgtttatggtttagtgccaaaatgtgaattccaaattgtggaggaattttttagaaatgattaatcagaaccgtgtctttctactgtttgatgtttaggtcccacgagtcatcctgtggctgatggtggagttggctatcatcggctcagacatgcaagaagtcattggctcagccattgctatcaatcttctgtctgtaggaaggtgaggggttttcctctagaaagtcatcagtgttttgctggatttccaagcagagataaaaacaaaaacccaattcatttttaattttgaagactcaactcaattgttatttcttctgtggaacctttctggaaacaatttcttctcccctggtagatgtagactctacatcttccgtttcccatggtgggttatgcttacctttattagaatgtgtggcgttttgtatcgcaattattgatttgtatgtcattttatcccgctagatactatctttttattttattttatttatttatttttttgagacagagtctttctccgtcacccaggctggagtgcagtggtatgatcttggctcactgcaacctccgcctcccaggttcaagcaattcttgtgcctcagtctcctgagtagctgggattacaggcacctgccaccatgtccagctaatttttgtrtttttagtagagacgggatttcaccatgttggccaggctggtctctaactcctgacctcaggtctaggaatgcccgcctcagcctcccaaagtgctggtattacaggcgtgagccactacacccagcccccactagatactatctatctaatcctataaaattctatctgtctaactccatgagggtaagacccaaacttttcagctttgtatcctaagagtgacatagtagactctcaaagtttaaatgaatgtaattaagttgatgctgttaccctactttacccaaggcctagttttctgccattgtccctcctccctcaagtcctagcttctccaagtgttctttatctggagagctgttgggaagagagtgtttttcaatgtttcctttctttccgtctctctgacttccatatctcatctctgacctagaattcctctgtggggtggcgttctcatcaccattgcagatacttttgtatttctcttcttggacaaatatggtaaggagagcrggaatgggagggtcaaaggagctgctctctgtcatgtggcagatggggaagtctaccttctctgagctcactgctgccttttttcctttaggcttgcggaagctagaagcattttttggctttctcatcactattatggccctcacatttggatatgaggcaagtggtacaggatattcattagcttcttaaaataagtttttgtggtttttttttttagccttttattataaaagacagtaataatgctagtatgattcacttatagtgggtgtatcaacaaaaagccaatttttccctgggccaattttaaaggaatatgatctatagcaaagattagcatgcagaaaggcctgcaggggctcccaggtttaaaatgactagatattttagggctttccagactagattctttggtcccaagttgaccatctgacaacagaacagccatggatagtgttaattaaggagggggttgcagggttattcttgggtgttaacttasaggagttctgcttttgttcatcctggtttatattaattgcagcttgaactttcccaatattaaaacagttaatgaattatatgaaatatactggatatttcctggtttgtgccccaacccagaaactccttagagtcactaatattatttgcagtactagcacctttctttgtacaattcttataaactgatttctgcttactggtctggctgaactttaaaaaatatatgtaatctatgggttgattatgcctcttggcctaaggcttccaagagaaatactgaaccggggaagagtatatatgagagtgtttaaggatgagtctctcattacacacgtactagtggcaaacagcaagtgatttttaaatgaacatgggtgaacagaagtatgctcagtatggataataaaaattgattctatattcttttttaatttttagatttttatttatttatttatttttgagccagagcgttgctctgtcatgtaggctagagtgcagtgggtgtgatcttggctcacttgcagcctccgcctcccaggttcaagtggttcttgtgcctcagcctcccaagtagctgggattattggcgtgtaccaccatgcctggctaactttttgtatttttagtagagatggggtttctctatgttggccaggctggtcttgaactgctgacctcaagtaatctgcccatcttggcctcccaaagtgctaggatttcagctgtgagccactgtgcctggccctggttgtatatttttgagccttgtggaattactaataaccacaagtcccttagcagctttttcttttttcttttcttttttttttttgagatggagtcyccctctttcgcccaggctggagtgcagtggtgcgatctctgcycactgcaacttccacccccaggttcaagcgattctcctgcctcagccycccacgtagctgggattacgggtgcccgccaccgtgcctggttaatttttgtatttttcgtagagacggggtttcactatgtttgccaggctggtcttgaacycctgacctcaggtgatccacccgccttgacctgctaaagtgctrggattacaggcgtgagccaccatgcctggccttttttttttttttttttttttttttttgagacagagtctcacactattgcctatgctggagttcagtggcacgatctcagctcacctcctgggctcaagtgatccttccacctcagcctccctagtagctagtactataggtatgcaccaccacascgaggtaatttttgtagagataaggttttgttgtgttgtcaggctgctcttgaactcctggsctcaagcaatgcgcctgccttggtctcctaaagtgctgggattataggcgtgagccaccgcacccagccctttctttagaaattaattatgtatcatacacatctgtwtcatatatctaagatgtgttgtaaactatccggatactcagtcttgaattctctggcccctaatagtaagccccttatgttgcttggtcctatgatgattctgtattcctcattatcttaggtagttgcagaagaaaagattttggccaggtgtggtggcctgtaatcccagcactttgggtggctgaggtgggaagattgcttgtwcttgggagattgaggtttcagtgagctgtgatcatgccactgcattccagcctgggtgacagagcaagatcctatctcaaaaaatataaaaataaggaagaaggcattgtaagggataaaggatgctaactgttccctggtactatgttactcccgtttcacrttcctgtaaaggctaatcattgttatgttggtatgtagtatgttacagtgaaacccagccagagccaggtactcaagggcatgttcgtaccatcctgttcaggctgtcgcactccacagattgaacaggctgtgggcatcgtgggagctgtcatcatgccacacaacatgtacctgcattctgccttagtcaaggtgagcaaggcccttatctccttcacctcctagacagttcatgggatcttttccttcaattgcaagggacacaaagttagtttacaattattaggaccatgaaggagcaaggtattttccaagcctggacatttataaactccatatacttagatgctgtttttatcaccaaattgaccagagattactaactgcataaagcaggtggggctaaagttctttttttttttttttttaaattgagatggagtctcactctattgcccaggctggagtgcagtggcgtgatctctactcactgcaaacctctccctcccgggttcaagtgattctcgtgcctcagcctcytgagtacctgggattataggcgtgcaccaccatgcctggctaatttttctatttttagtagagatgtggtttcaccatgttggccaggctggtctcgaactcctgagctcaagcaatccacccgccttggcctcccaaagtgctgggattacagscgtkagctactgcacccagctgggactaaagttcttcataaaaggttggaagtgcatcaagtctcttgtgtttaaatttcaaaagctcgagtggccttatggaggtcaggagtaaaggagcccaaacaggcttttactgtcagtattatgtaatagtttgctgggagattttagaaacctttataaataggtatatgcacaccttasgactgaaatcaggtcgtttttataggtcagtggtccttccagccactgagagtaactgagagctcagtagtcatttagtctctgttccctatttggggaatgtacagttcaacgaaagggcatgaagttcttttttctccccycatatgaagttcttaattgctcagtgaactaggatgtaggtgagtgttggatctctcacttttcgtctggtcaacttttgtcccctaaatctctcagctgactccaaactcctgaaatgtcacaaggaaacktgttctaactggtcaaaaagtgactgctgttgttatctttctagtctagacaggtaaaccggaacaataagcaggaagttcgagaagccaataagtactttttcattgaatcctgcattgcactctttgtttccttcatcatcaatgtctttgttgtctcagtctttgctgaagcattttttgggaaaaccaacgagcaggtggtgagtaagccagggttatgggtggtagtgaatgtgagggtaaagtgaagactgcaatgggatggggaaggaaaatacctcatcctagtgttaatgttcaggagaaataatctctagcttctcgtctgccccccaaaatcactgtgcaccagtcagagtctacagtatggggctgaccaagcctggaccctctttctcagcttttgtttgggagtagtcaacaaacagaaaacagaaactgtgatgatgacagactttgtcttgtcattttgaattctgtatcaatcttgatttctgattacctatgtagtgttttttttgagacggagtcttgcactgtcatccaagctggagtgcagtggcacagtcttggctcactgcctccacctcctgggttcaagcgattctcctgcctcagcctcctgagtagctgggattacaggtgcctgccaccacacccagctaattttttgtaattttagtagagatggggtttcaccatgttggccaggctggtctcaaactcctgacctcaagtgatccacctgcctcggcctctcaaagtacagggattacaggcgtgagctcctgtgcctggcctgcctgtgtagttttgatcaccatttgtttcccgtctatggaacctctgactcctctgtctgctttgactgaggattctattctgggtgttctctcatgtctgaagccttcttcagagcctctcctcttgtcatcatttaaagtaccccagcgtttgtacattattaccatgcacactgtaactcagtaaagatttttgatgacctgtgggtgtagaaggattatagaggaagatcctagataacattgctgctagtctctgcccacatcacagcatatgtccagtgttttccctccagcctaccycttatagatgattgtgtatgatatgtaggagagctcttatttggtccttgcttctgaaacaaaagttgctgttgaattgctttgggttctaggttgaagtctgtacaaataccagcagtcctcatgctggcctctttcctaaagataactcgacactggctgtggacatctacaaaggggtaagcatgtttggatttgtgatctttgttcctgaatcagtatttttagcatagtatgtggtcttttttgtgacttcacttcagatatgagcatatctcctctggagtgtcatttatttcagagttccagacaccagacaagcattttggattaaatgggaaggaatagaggatcagttgaaaagatatataatacaggccgggtgcggtggttcacgcctgtaatcccagcactttgggaggctgaggcgggtggatcacttgagctcaggagttcaagaccagcctgaccaacatggtgaaaccctgtctctactaaaaacaaaaatacaaaaattagctggatgtggtggtgggcacctgtaatctcagctactcaggaggctgaracacgagaatcgcttgaacctggaaggcagaggttgcagtgagccgagattgggccactgcactccagcctgggcgacagaataagactctgtctttaaaaaaaaaaggaaaaaaaagatgcagtatacaccccagcttttttttttttttttttttttggagacaaggtcttgctctgttgcccaggctggggtacagtggctcgatcatggctcactgcagcctccacctacctggtccaagtgattttcccatctcagtcttttgggtaatgggactgcaggcaagcaccaccatgcttggctattttttttttctttttgagatggagttttgttcttgttgcccaggctggagtgcactggcgtgatcttggctcactgcaatctctgccttccgggttcaagtgcttctcctgcctcagcctcccaagtagataggattacaggtgtgtaccaccacacctggctaattttgtatttttagtagagatgggggtctctccatgttggtcaggctggtctcgaactcctgacctcaggtgatccacccccccctcggcctcccaaagtgctgggattacaggtgtgagccaccatgcctggccttgtattttttttgtagagtcagggtatttgccatgttgcctaggcttgtctcaaactcctgggctcaagggattctccaaccctggcctcccaaagtgctgggattacaagcgtgagccaccctacccagccccaagaaagtgttcttagtaaagtgtttttactggagtctctcagttcttttatgctggttacattgtgatccyccaacagtagaatatatagtgtgtagcatttcaccaatttatttgatatttccctgtacttctattgccattttccagaatagtgtgtaaaggaatataatttggggaaagtggtgtagacctcttttttttttttttttttaatatttaaratggaggtttaggagcttggagaagagaaaggactaggcagagaaacgaaggagcatccagtaaagtttaractgaaagcttytggaatgagrtccrracttgagcctakcttctggcacagtgcscagcacagcacttggtgttggtggtgcatagcaaagaagggagaaatgccacagggaactgctgttttggatattgtctgagcagattattgccacaatcatatccttcctcttggcctctcacagggtgttgtgctgggatgttactttgggcctgctgcactctacatttgggcagtggggatcctggctgcaggacagagctccaccatgacaggaacctattctggccagtttgtcatggaggtacgtgctggtatakgatagagggagataacacaacccttttgytacttcttcttcttcttcttytttttttttttttgagatggagtctcactcgtcgcccaagttggagtgtaatggcatgatctcggctcactgcaacctccacctcccgggttcaagtgattctcctgactcagcctcscgagtagctaggattacaggctctggccaccatactcggctaattttttgtatttttagtagagatggcgtttcaccwtgttggccaggcaggtcttgaactcctgacctcaagtgatctacccgccttggcctctcaaagtgctgggattacaggcgtgagccactgcgcctggccccttttgtcacttcttaatcccattcttctgaggtctctcctgaacctccccaaaacttttttttgtttcctgttgcagacagtcatctgctcctatgttttcttccagggattcctgaacctaaagtggtcacgctttgcccgagtggttctgactcgctctatygccatcatccccactctgcttgttgctgtcttccaagatgtagagcatctaacagggatgaatgactttctgaatgttctacagagcttacaggtgaggaggaagctgaggaaacacatcctagttattcaggtagcattatgtactgcccttgggtaccaagcctagctgagtgctggggggatattgagaggaagacagaggcatggttgtggtckgcagtaaatgtatatgaaatccttggcatctaaaaggattttagaaatggttggttttttaaacctgttgaatgggaactatgaactttacttacatatgggacacaaaattgtagttcattaatgcaagcaaacattaaatgaacatataggacactgtgctaggtcctgtggaggttaagaagacaagtcacatacaaaggtttgtatgctaggttaatgacagctctgcagaattcagcataatgcccaagcatgttgggatgataggaataattatttctcatggagtagttgaggcagcatttatgtttccctttcattaattgtgctgttctctagggtgatacaaggacccatagtaatcccatctgatcttctttcttttccagcttccctttgctctcatacccatcctcacatttacgagcttgcggccagtaatgagtgactttgccaatggactgtgagtgtactcctcttcgttcccaaaggggatgctgatatggggaaagggtatcttcatgcagtaggccagtcagacgtgagacacagagggaagcgatatgctttgagaggtgattgctagctgcttcctctttggcttagagaatggaaactgtgaatatagtaaaggaagagaaagcacgtctttcatatgaaggggagagaaagttcagcttttacagcataactcttcagcttcagccactgaagtttgaggcaccttaattctttgttaaatgatcttaacaaaaaaggcataagttagtaccttttatatatatctttaaaggatatgaggtatctgaagtgacttgttgcatttttgggaacgttaataaaatggctcattgcgtttctaggccttgttgcatctctagggacttaaatattagggattatttgttggtgtcttttcccccctctttctccctgtctaccagtatctaactttgggtgatttaacttagacttatgaagaatcattttttttcaaattaagaacaatttttccattcattttgaactgcctctaattcccatcctgtttccttttctgtctgtggccaagttggattattccatcagtgactgwgctgatttcttttacagaggctggcggattgcaggaggaatcttggtccttatcatctgttccatcaatatgtactttgtagtggtttatgtccgggacctagggcatgtggcattatatgtggtggctgctgtggtcagcgtggcttatctgggctttgtgttctacttggtaagtctagcctggaagagcagrggcataggtatcagggatggttgaggtggggttcactgacattcagaaatgaacagacccaggctgggcacagtggctcatgcctmtaatcccagtactttgggaggctgaggcgggaggattgcttgaatccaggagttagagaccaatctgggcaacatagtaagactccatctctacaaaaaaagagaaatgaacagacccaaaagagcacataacaatctacctccaggtgatcgagacaatgtatatggaattgtcaaatcagctgtttacaaaataatatttctaaccataaaattcactttggttactaagatttgtcatttttcaatttctgtcacttctgtagtttccattcttagtaattcctaacaagagagtatagtatgtttgaggaactaaaagaagggtagcagtacagagagtggagaacggtacaaaacagaggtggagaatagggcatgcagtgtgatttagagattcggggtgggacacatgtggcacacagccccactcagctccatcacttactagctgtccaaggaaataaktaaatagtgatagtctccccttgactctcattctagagtcattttttaaaaatcatggttataaaactatagctacatgaaaaaggtatgtaaaatttatatttcaattataaaaaattttttaagaagtctagaattatataaaaatggcaatatagttgttgtaggaagctaggattatagatatattcttctctattttccaaatctyctttagcattgcttatattaatgaaaaacagccaaaataacaacagatccatttccctgttctatacaggtttctttgaaaagacacaggggttagggataaggaatagtagaatttataccatttttgctgcagagaatggctacagatggaggctggaaacctgctgttaatctctagaacacttscccacaccagtgtgccacacattagatactttattaagaaaatcacttcagtaaatgttgaaaaattatttcctagatctcttctttttttcttcccaataaactttgtgcacacaaagactgtactgaccctatgatctaggaacttaacttcaaggaaaaccaagtaactgaatgtgtccttgacaggaattgtttttaaaaattcactatagaagttagggggatcctttcagaatgcaaattggatatgaasatgccagtttgtcctcagtcagcctaaggctaatgagcttgttgaagacccattattattattatttttgagacagagtttttctctatcgcccaagctagggtatagtggcatgatcttagctcactgcaacytctgcctcctgggttcaagtgattcgcctgccttagcctcctgagtagttgggactacagccatgtgctaaccatgcctggctaatttttgtatttttagtagagatggggttttgccatgttggccaggctggtctcaaactcttgacctcaggtgatccacctgcctcagcctcctgaagtgttgggattacaggcatgagccaccgtgtctggcttgaagacccattttgagaggagagggctgattctagagtgggttactgttgtttaacttcaaaacaggaacttcatagagcagcttaggagactacaccaattgtattagtctgttagtcattcttatcatggggaggactgaggaaaagtggacttccgagaacttacagttgggtaaaagaaacaaacaacaggctggacgaggtggctcacgcttgtaatttcagtgctttgggaggccgagccaggaggattgcttgaggttaggagtttcagaccagcttgagaaatatagcaagacaccttgtctctacaaaaaaaaataaattagctgggcatggtggtgtgcgtctgtaatcctggcaactcaggaggctgaggagrgaggattgcttgagcccaggaattcgaggcttcagtgagctatgattgcaccactatactccagcctgagcaatagagggagaccttgtctctaaaatgtaaaataataataaagattttaaaaaaaaggaaaaccacagacacaaagcagtaagaacagagaaattcaatatttaaaatagtatggacaaactttgttgaggaaggcagctgattttttgaagggggagtggggttgagagaatgacttgtgcaacccttggtggtagaagatgggcacagctggatgttcaaggaagggagcaggtttgcatttgagaagtgctgtgtgagcagtcatggctcttcaaagagcctggtgagtgatgaccatrttttgtctttcagggttggcaatgtttgattgcactgggcatgtccttcctggactgtgggcatacggtaagcatctctaaaggcctgctgacagaagaagccacccgtggctacgttaaataacactggattagtctgtcttctgcaggtagccatcagagccagtgtgtttctatggtttactgtgtgaacatagccaaaagtatgtgccgttgcacagactgtgtttatgactcaaccgttggttggaaaagactttgtttcatgtgtatttgaaagatggaattattttttccttcctgacctaaccttagaactggattagggtgggatctttgaaaagctgmcatttgctgctatcattccaacactaaattcttaagtagttgcccaagggccagctcagtttatccttcggagagacaaggatatgcatgattcttaaccaggctatatgttaaaaaaaaattggaaaatgcartacattttttattatacaaactacagaatgartatgcaagttttatttatcaaaatgtaatggatttttaaaggctgagaaattttccttatacctaccttttcagttattttaattataccaaattatcaactagaatagcttcatccatatgaaatataaaatgaagagacacctagctctatcaggcttaggattctttgaacttatttccactttaatttctcagtggaagttaagaggggtgagaaaacaaagaaggggaaaaactgacaactaacaaaaccagcaccacatcgctaggtggtgcttactaattaccttctcaggattttcctcagattgaaaagcttatgaggatttcttgggagtcttaataacctgcctgttagtacagagctttcctgatgatatttactcttgagcacatgtggttgtaaaaccttaactttctttctccaggagggtggtgatagaaacagatggtagtatttatgaactgatgttctcgtgaaatgttgagggtggggagaaaagactttaagggaggagagccatctattttgttcctaaagccacctctcagcagaatcgtcatgtttttctgatgcaccgctctgcttcatgcccaagatgacttgcgaggcaatctcaggagctgtggacttaaccrttgcaaagcacactgtctttctcagcgttctctgcaagtcagtaggtgttagtatggttgcaaagttcactgtctcagcaaagttgaactgggctacctctctacagctgtttcctcagagggaaaaatcttgagaccagatggtggagctctggagtcagaggaaatgggtgtcttcagcacaaagctgctgcttttacttcagccacttctgacatttttacataccgagcctgagattrtgtgattatctcaaatcaaatcactttgatggagataaataatcaaaactgttttatagtcattgatttkgtgagaacagtaatggaaaatggtgttgaaggacttctcatttttggagctttccttccagagtcctggctgattggtgttcgctgttcatctgagcccccaaaagcattattactgatacttgcacacagtcaaaagcgcagactggatggatggtcttttataaggcatttaagggtacactactgtgtttcactgaccatacatttttcttagcccctcaagtaatatagcacagagttatgaatgacaattcccctaaccattcctcttcatatctgcctcttccccttaccatcgtaattctccaaactggtcataaaggcactctgtgaagatattggggactgacatcttaagctctcacctggctgcagtaggaaaggccaaactgacgacaaaaaaaaaattctttataaagatgatatggtaacatgtatctttgccctgggtctgggtgggtccagtcagtctcagatttacaagcatttaggagcctaggtaaaagctgctagtattcttttaaaagttayatttatgacttgcaatgatagaaaactccttccaattaaatggcattttataatattatgtgtgtacttcacagtgttaaaaataccctcatacgttattgcatttgatcttcacagaaagtgcattttaaccagtactctgggtgcaataaataatatgtagaaatttaagtcctccaattccagcatatccagtgagttttgacagtgtgtttatgtggaatgtttaaggatatacaattgtactttatataaattggttcttgttcttcttaaatgtgacatgaaataattgtgctgctacattatactggaaattaacaggggaaaagggaagagctcttggctcccttgaggttctgctagtggtgttaggagtggttacaactgagcttttagtaaccatttaaccgtatgtaaacttggtttctaattaaaaaaaaatttctttttccaatttggtttcctgggtatttttttaaccttgaaataatttattaatagggttacaacaactttgatacaaaaatactgaaacagcaactaccacctggaatggcacactaagtccacactgttaggattttctccttagaaaggatagagaaataaatggatttagtcctcagaaagcttggattaattgcagataccaggatattaatttccatttacccacttagtcaaatagttttaccatagctaaaggtcacatcattaccatgttgaaacttgggaaaaaaattttattctgcttttctctaagctgactattttctacctgtagcttatttcactgtttcacttttacattctatatgtgctgccaatgaaaaattagtatttraagagaaaccaaamtcatttagcttaaagaccaaggagcattttggcagacctgatataaatggaaatattgacaccatttattaaaaacaaaggcagagctcaggcacagtgaactttactaggcacatgacaggaaaacttgagtcagcacttgatttgtcccaggagtgtcaccagaacttcattttccctttctctgttgcaaggcttccctgtgagtaacacagtggaattcatctaggaagaattttgttctccatgttgtccttcctcatttagtgctctctctttactttggatttaatttcagaactaaaataggattcaaaacaatgtgaggatcctgttttgaaacatttcctttagctctgccctctggaataccttctgctccttcattggtaggaccaatgaatctaaatctgtcagcttctctaagtcccttagcttatgaatttaaaaatggctaactcagtactgtgttctaaggcctggcctgaacagttgtattatctcatttaatccttgtaacaacaagaggatcagcctctatgtagatgagtcaactggaaggccaaaagtaacttgcccacatttacattactaatgaaatgtgcagttggcatttgaactcgcatagcttaactccagaacccatgttttcattcccaaactatcctgtgtaatatatagtatacccttcatgttgggttgtcaccaagctttgttgtttagcagcacaaggaacataacacactgaagcatttgtttcatactctgattagtgctagaatatgcattaggcagaagttrccaactggtagattttggtccctgtgcagaatttttaaaagtaagtttgaatgcttttggcaagtgtagagaatggacagggccctctatggtcctatcccagcaatagccaagagttactagttaataagttcactcatttgcattagctctctgccccyggaagtattttascctatttccaggccatttagtctcatttctcaatgtctcagaacaatataacaaacatctccaatgaaagtggtctatcaactaagtcatctaagtgacactctgtgggcatcacaggaccaatactgcaacccttgcttactacgtattgaagaagtctaccaccattgctcacttgggaaaggcttcaatgaattgtcaatatatttaattgctgttatttacttaagcctaaattaagcaagctgatgtctgaagagctgtttccatgtcctaaagccagtgtaatacagtgttttcctagcccactagttggaaatagttttatcctgggcatcatttggtctaatctgtcttcacacagtcatcactgcaagcctgtgaggttatacactgcagtttgtaatgtgttaaatatatgtgtcgaagactcacatgagatagtatattggtgtacttggcattttctttttttttttttctgagatggagtcgagctttgtcacccaggctggagtgcagtgctatgatctcgkctcactgccacctctgcctcccaggttcaagcaattctcctgcctcagcctcccgagtagctgggattacaggtgcccaccaccatgcctggataattttttttttttaagatggagtctcactctgttgcccaggctggagtgcagtggtgcgatctcagctcactgcaaccttcccttcccaggttcaagcaattctcctgcctctgcctcccaagtaactgggactacaggcacacaccactaaggccagctaatttttgtatttttagagatggggattcaccatgttggccaggctggtctcaaacccctgacctcatgatccacccacctcagcctccctaagtgctgggattacaaacgtgagccactgcacctggctaatttttgtattttcagtaaagccagggttttaccatgttggtcaggctgctctcgaactcctgacctcaagtgatctgcctgcctcggcctctcaaagtgctgggattacaggtgtgagccactgtgcctggctgtacttggcattttcaaatgtagcatttattcacattttacaaatgagtagaataaggctccaaaagtatatgtgacatgctgaaggccatagaaagtggcagagttaagggcttgaacccaactccagtgcctttatattacactaaaatagggatagttgctaccaataaatttatagtctgcattctgcattaacttagaggctgttggtgccaaaggataacaataaaagctctgcgtaataataatagggctaaaatgagactcaaacttgtctcaaggtgtattcgagaagagaaaaagtaaaaagaaataacttcatagccagcctaggaaacatggcaaaaccctgtctacaaaaaaattagctgagtgtggtggcacacgcctatagtcctagctacttgggaggctgagatgggaggatggctgaagcccaggaggtagaggtggcagtgagccaagattgtgtcattggcactccagcgtgagtgacatagtgaggccttgtctctacaaaaaaaataacaacttcacaggtcccaacacaaaccatctagactcagttctttaggagtggagtctggaattgtgggtttttttttttttttttttgacggagtctcgctgtgttgcccaggccggagtgcagtggcatgatctcagctcactgcagcctctgcctcctggattcaagtgtttctcctgcctcagcctcgtgagtagctgggattacaggcatgcgccaccatgccccgctaatttttgtatttttagtcgaggggtttcgccatgttggtcaggctggtcttgaacttctgacctgaggtgatccatgcgcctcggcctcccacagtgctgggattacaggcatgagacaccgtgcccagtcggaattgttttttgtttgtttgctgttttgttttttgagacggagtctgactctgtcgccaggctggagtgcagtggtgcaatctcggctcactgcaatctctgcctcctgggttcaagtgattctcctgcctcagcctcccgattagctgggattacaggtgtgtgccaccacacccagctaattttttttgtatttttagtagagacggagtttcatcatgttggccaggatggtctcgatctcctgacctcatgatccgcccaccttggcctcccaaagtgctgggtttacaggcgtgagccaccgcacccagctgggaattgtgttttaaaagcagcttcggtgattctgatgcaggctgacaaacatttgggacccacaggtcatctttctccctcttggtacatgccatttcatgtttttgttttttaaatgaaaggcttttctctgctccagtgccaaaggataatagrgctcaggattgaaaccattgggaatttgatttctaattcacacagtagtaaaatacaaaagcattctgcttgtttgttcttatcctgatttgaagcacccatccttaggcagagtgtgtcacaagaatagtcagagtgctaattttgctraggacatttggtaccatctcagtccttaactatttcagctcctacctgttattttgcatatcagaagccattcatgtatgtatctgtaagccatttcttttctgaaataaaaatcaatatagcagtacagaaaaaaaggcctaaattgatgtgctaattataggtacttaaaagctgatttcaataaatacgtgaaaatcagtctaaccctcttccatctttttttccttagtgccatctgggattgacagctcagcctgaactctatcttctgaacaccatggacgctgactcacttgtgtctagatgactgacagcctgagagactctataagaacatgtttttctaagccctttttgtgccaggtgtcccgttaacgtctctgttagttcagaggtgagttttgttcagacgttttgaacaaaaggcaaagatttcctcatgggaagggtgttcaaaactgacagctataaatgtaggtcagagacccacccacctcataacagtcatacactcccagagttaaacgattggcctctgatggccacacacccctatgggcttgtgtcttggactctgggatttaaaagatatatatgtatatatatttatgtaaacctgagcatctcagtttgggtagagttttaaggttatatgaaactgatagaacttttgtattttttttttaaatattgttttgatatatcagatatttgttttgtctggatcacaagtgagaaagaaaagagaayaatgctctttttcacaatgaactggtcaaattgactatcttgtaaagtgatactttactatgtcagtgaaatttcagtttgattttagtcaaccagattatatcctttgtatctactgatattaacacatcatattaacacaycatttcttaaaaaaacatttcttctgtttggcaatcataattaactctggttatcagcctattttgtaattattgtctttgtcgtcacttttcttgaattgttttctagtcattaaacagatatgaaggcattgccaaagagctttaatatccagtaacaagatccagaaaccamactttaaccagtgatcagttttccgtgctgcattgtaactcagctcattctggcattcaagttttaggcaaaaaaagaggaaacttctaacatttagcttgtaagtcctgacataagatagtgaagatatttatcttctttctaatatttgtatagtccgccaatgtattttcttcccactattcccattaacataccaaacactgtttctaggtccaaagtctatttctaggagtggccaatatttgtattgttgaatctcctagggaatgctaaatgtttcactttaaaatacctatttataccaagtagcatgagattagtactagagtgagatttggaatattagtccacatatcacaaactgcttgcctacatgtatagattttttttttcacccaccttcctaaccaggaatttgtttccttaaatttgttgttgttgttgttgttgtttgttgttatttttttgagaagagtcttgccctgtcgccaaggygggaatgcattgacgtgatctcagttcactgtaacctctacctccccggtttaatcgattctcctccttcagcctcctgaatagctgggattmcaggcaccmcatttttagtggagatggggtttcaccatgttggccaggctggtctcaaactcttgacctcaagtgatctacctgcctcagcctcccaaagtgctgggattacaggtgtgagccactgcacccagcgttttttgttgttaagacagggtcttgctctgttgcccaggctggagtgcagtggtgtgatctcagctcactgcaacttctgccacctgggcttaagccatcctcccacttcagcatcccaaatagctgggactgcaggcacacaccaccacacccagctaatttttgtattttttgtagagacgggatttcaccatgttgcccaggctggtgttgaactcatgagctcaagtaatctgctggccttggcctcccaaagtgctgagattataggcgtgarccactgcatccagctcactcctcatttctttctagccccaaaggtgttgagtcagcaaatcctgcagcctttgtgtgactttgagcatcactttcccctttcagcattaaatatatgacctctctgccttattttagaacttactacatttcaataaaactttttaaaaaatccagacattgcctatgttcgtttataatcggcccttaaagaggcagggatttttctaaaatgacactttaaaatttcctcatttctacttcagggcctcttgaaacttcagataatgagagcagccaaccctgcaactcaggctatagagtccttctgatcttaaaactgagactgaattcacatcagttttacgcttttacttgaaaaagagactcttaagtgtttttggtttctttatacaggacaacaactctagatgaaaccagtgtgttggattttccccgcctccctgggtggttttatttctcagttgtttcattaccagagagtgttggggaaacgaaggtaaaaaataaaaacatcctgttgtgaaactcatagaaaggtgaggtggttggttaagtacttatggaatttctatagctcttttccagtcctgaactatatgttactaggaacagagaatacaggtttacaagtgtaccgttcaggtcacagaactcctgtaatcagaaaatgtcataataaagcaaactgaatcatgtcaaagccagtagaggaggttgataactaagagtgagtcttgggtaagcttttttctaagttaagaatatttaatcactctccaatttgtggtatataaatctggattactataagtgtacttgtgcatatattaatatattcaatcttaagaataacctgagtgcattcacttaattcctggggttcaacactatagagtcaatctgtaaaaggatgctctgacaatgtatacacagaatgtcagaaaaagtgcaattacctaattgttactgagcagtcactgctacataactgtgtgccagcctaatataaaaggcaggtgagtgtatccaggtatatgaagtagtttcattagtaacagaggcagtggttttagtagctaatataaacagccttctcaatttcagacattacaacatgaggccactaaaattttgcccaggaagtcttttgcaaattcaagtattgttatgttatctgtttatagggtcttcatgcaatgaccctcaaactttacccaagctgaagtgggtaaattcacatcctgcatacttcctaacttttcttcaaatgtgattttacatttttttttttattattatactttaagttctagggtacatgtgcacagcgtgcaggtttgttacatatgtatacatgtgccatgttggtgtgctgcacccattaactcgtcatttacattaggtatatctcctaatgctatccctcccccctccccccaccccaaaacaggccccagtgtgtgatgttccccttcctgtgtccaagtgttctcattgttcaattcccacctatgagtgagaacatgcgacgtttggttttttgtccttgcgatggtttgctgagaatgatggtttccagcttcatccatgtccctagaaaggacatgaactcatcattgtttatggctgcatagtattccatggtgtgtatgtgccacattttcttaatccagtctatcattgttggacatttgggttggttccaggtctttgctattgtgaatagtgccgcaataaacatacgtgtgcatgtgtctttatagcagcatgatttataatcctttgagtatatacccagtaatgggatggctgggtcaaatggtatttctggttctagatccctgaggaatcgccacactgtcttccacaatggttgaaccagtttacagtcccaccaacagtgtaaaagttcctatttctctgcatcctctctagtacctgttgtttcctgactttttaatgatcgccattctaactggtgtgagatggtatctcattgtggttttgatttgcatttctctgatggccagtgatgatgagcattttttcatgtgtctgttggctgcataaatgtcttcttttgagaagtgtctgttcatatccttcacccacttgttgatggggttgttttttttcttgtgaaattgtttgagttctttgtagattctggatattagccctttgtcagatgagtagattgcagaaattttctcccattctgtaggttgcctgttcactctgatggtagtttcttttgctgtgcagaagctctttagtttaattagatcccatttgtcaattttggcttttgttgccattgcttttggtggtttagacatgaagtccttgcccatgcctatgtcctgaatggtaatgcctaggttttcttctagggtttttatggttttaggtctaacgtttaagtctttaatccatcttgaattaatttttgtataaggtgtaaggaagggatccagtttcagctttctacatatggctaaccagttttcccagcaccatttgttaaatagggaatcctttccccatttctcgtttttgtcaggtttgtcaaaggtcagatggttgtagatgtgtggtattatttctgagggctctgttctgttccattggtctatatctctgttttggcaccagtaccatgctgttttggttactgtagcctggtagtatagtttgaagtcaggtagcgtgatgcttccagctttgttcttttggcttaggattgacttggcaatgcaggctcttttttggttccatatgaactttaaagtagtttttcccaattctgtgaagaaagtcattggtagcttgatggggatggcattgaatctataaattaccttgggcagtatggccgttttcacgatattgattcttcctacccatgagcatggaatgttcttccatttgtttgtatcctcttttatttcattgagcagtggtttgtagttctccttggagaggtccttcacatcccttgtaagttggattcctaggtattttattctctttgaagcaattgtgaatgggatttcactcatgatttggctctctgtttgtctgttattggtgtataagaatgcttgtgatttttgcacattgatttttgtatcctgagactttgctgaagttgcttatcaccttgagattctgggctgagacgatggggttttctagatatacaatcatgttatctgcaaacagggacaatttgacttcttcttttcctaactgaataccctttatttctttctcctgcctaattgccctggccagaacttccaacactgtgttgaataggagtggtgagagagggagggcatccctgtcttgtgccagttttcaaagggaatgcttccagtttttgcccattcagtatgatattggctgtgggtttgtcataaatagctcttattgttttgagatacatcccatcaatacctaatttattgagagtttttagcatgaagggctattgaattttgtcaaaggccttttctgcatctattgaaatgatcatttagtttttgtcattggttctgtttatatgctggattacatttattgatttgtgtatgttgaaccagccttgcatcccagggatgaagcccacttgatcaaggtggataagctttttgatgtgctgctggattcagtttgccagtattttattgaggatttttgcatcaatgttcatcagggatattggtctaaaattctctttttttgttgtgtctctgctaggctttggtatcaggatgatgttggcctcataaaatgagttagggaggattccctctttttctattgattggaatagtttcagaaggaatggtaccagctcctccttgtacctctggtagaattcggctgtgaatccgtctggtcctggactttttttggttggtaagctattaattattgcctcaatttcagagcctgttattggtctattcagagattcaacttcttcctggtttagtcttgggagagtgtatgtgtcaaggaatttatccatttcttctagattttctagtttatttgcgtaggggtgttcatagtattctctgatggtagtttgtatttctgtgggatctgtggtgatatcccctttatcaatttttattgtgtatatttgattcttctctcttttcttctttcttactcttgctagcggtctatcaattttgttgatcttttcaaaaaaccagctcctggattcattgatttttttgaagggttttttctgtctctatcttcttcagttctgctctgatcttagttatttcttgccttctgctagcttttgaatgtgtttgctcttgcttctctagttcttttaattgtgatgttagggtgtcaattttagatctttcctgctttctcttgtgggcatttagtgctataaatttccctctacacactgctttaaatgtgtcccagagattctggtatattgtgcctttattctcattggtttcaaagaacatctttatttctgccttcatttcattatgtacccagtagtcattcaggagcaggttgttcagtttccatgtagttgagcggttttgagtgagtttcttaatcctgagttctagtttgattgcactgtggtctgagagacagtttgttataatttctgttcttttacatttgctgaggagtgctttacttccaactatgtggccaattttggagtaagtgcagtgtggtgctgagaagaatgtatattctgttgatttggggtggagagttctgtagatgtctattaggtccacttggtgcagagctgagttcaatttctggatatccttgttaaccttctgtctcattgatctgtctaatgttgacagtsgggtgttaaagtctcccattattattgtgtgggagtctaagtctctttgtaggtctctaaggacctgctttatgaatctgggtgctcctatattgggtgcatgtatatttaagatagttagctcttcttgttgaattgatccctttaccattatgtaatggccttctttgtctcttttgatctttgttggtttaaagtctgttttatcagagactaggattgcaacccctgcctctttttgttttccatttgcttggtagatcttcctccatccctttattttgagcctatgtgtgtctctgcacatgagatgggtttcctgaatatagcacactgacgggtcttgactcttcatccagtttgccagtctgtgtcttttaattggagcattcagcccatttacatttaaggttaatattgttatgtgtgaatttgatcctgtcattatgatgttagctggttattttgctcgttagttgatgcagtttcttcctagcatcgatggtctttacaatttggcatgtttttgcagtggctggtaccagttgttcctttctatgtttaatgcttccttcaggagttcttgtagggcaggcctggtggtgacagaatctctcagcatttgcttgtctgtaaagtattttatttctccttcacttatgaagcttagtttggctggatatgaaattctgggttgaacattcttttctttaagaatgctgaatattggcccccactctcttctggcttgtagagtttctgccaagagatcagctgttagtctgatgggcttccctttgtgggtaacccgacctttctctctggctgcccttaacatttttgccttcatttcaactttggtgaatctgacaattatgtgtcttggagttgctcttctcgaggagtatctttgtggcattctctgtatttcctgaatttgaatgttggcctgccttgctaggttggggaagttctcctggataatatcctgcagagtgttttccaacttggttccattctccctgtcactttcaggtacaccaatcagacgtagatttggtcttttcacatagtcccatatttcttggaggctttgttcatttctttttattcttttttctctaaacttctcttctcacttcatttcattcatttgatcttccatcactgataccctttcttctagttgatcgaatcagctactgaagcttgtgcattcgtcacgtagttcttgtgccatggttttcagctccatcaggtcctttaaggac

SEQ ID NO: 8797 - DNA, 15448 bp, Homo sapiens
ttttaaaataaatggagaaagtcccatctgatgctagaatactaacggtattgcaaatcttccttttcaataaaaagagagcaggcctaaggctcagaactttggcaagcaacaaaatctagctagcatttactaacattgttttgtcttcatggttactttctatttatggcaaatgacacgagttttccacgtgtggtaatggcagtcatataaaattttctttaaaaataaatgcattgagttttaaaaatgagtcaataattttaaaaatcataaaagttttaaaagtgagtcaataatttagaaaactgtagaacacctrctgttcagaatagcataaatcacaaagatgaaatgtgaatagctgaaatatggaggataaaaaaacataatcaagttgttgtgtaggatattggcaatttttgcttgtcagctccatggtacttcttccgaatcaaaaatttatctcctcagtggccctcaaagcactttcttcccactataggcttgttcagtttagagtagacaggcccttggatgttaccaagcccaacttcctatttcataaatgaagattgagaaacaaggcaacttgcttaaggttacaatagaatatgagagctgttttgggactaacacctaggtctcctaatcccccatccatgccctctccactgaaccaaaccgcttccatcatatatatatatatatatatatatatacacacacacacatatatatattatatatatacatatatacatatatattatatatacacatatatattatatatacatacatatattatatatatacatatatattatatatacatacatatattatatatacacatatatattatatatacatacatatataatatatatattatatataatatatatataaaaatatatagtatatataatatatatataagatatatatattatatatatgtgtgtgtgtatgtacatacatgtatatctgaatgtgtgtgtgtgtgtgtatatatatatatatatatatacattcaccatcacacagtgttcattcccatacctgaaggagactcaagcaattcctctcagattcagcaaaagaagattcagttaagcactataccctaaggcatccattgcattgtatgtagtgacttaatttctctcttatgtccctaggagggtaagagatatgtcccagctttgggaaaaataattttctgtagggcttaattctcttgcaaaatcccaatttgagaaaagctgctagagtgtaacctctttgaatactgattcttttcagacgaaggagtcttttgaacggccaactgaagtctcctctgctttaatttaatgccgtctccttttgttcagtgcttctaagatgtggagaatttattagtatgtctcataaaactctagtgtagcaggaaattaaattcatctggtataatcagctgtttggaaagatttgctggttgctctgctctaagttatggttgccaaggtgattgcaaattgattgtttgatgacttgttctagcatctttccaggtactgatgttaagtttagacatagacaaacctaagcaggaataaaagaggcctaccatgatggtaaaagggactctagaaccaagggaacaaggaatgtttaacctgaagaggttttgtttgctaaggagaactttaarggattctcccaaaagctaggacagagaagagacttgttttcagtggcctcaagggggcagacttaagatccatgggtagaagtgagaagatggatttcagttcaatactgggatagctagagaaatatgcacctgcaaaaggggctggtaagcttgctctctctaaaaatacctctgagttttggtgggtgcattgtgtaagaagctgactagattgtgagatgcttcattcaaaaaacgctgacatcccatctagctatattactcaatgataatagtaacttacagaatcattcttctttctaaagaaccaagttttgtctgttttttcaattattttttcacagcaatccaaattaaaggtaaattagcaattatccatgttcaaaggatcctatcatacatttcatacatgcgattagataggaccaatatgcattctatatatattttttgattcaaaaataagatactaacagtaaggtttttcttctacggcagtatgctaagcacttgacatgcatttaatctcatttaatgtaaatttaatgggataatgctgtacagagacatttttaaagacaagcattttaaactattgtttgaaaagaaatctacagatgtttctgtgctccaggatcatacacaagaaaggactcttgtctaagccaagacccagtataagattttcctaagcatccagctattggtgtgagggcatgctctggcaccatggaagcttactcctattcagacattcattaggtaaatccagatatgaggttttattcctgtttgacaggcwgggaacgacaaatcagtgtcttaagggattgacaaaatatgtaattagatgctatcaatcaccataaaagagcctgctttttcttacatcagataaaggtgcgtttagtctactaagaactttccagttcaaatgaagcattaactctctaaggtcatgtgaacagtaagcagtgctactcgaactcctctgctgggaaataaaataacagcattaggcagggaaaacttgtgaggccatgagcagacctggactcctaattttccttaacactttggcctggacacttcttgttttttcacttcagtaacctcatttgcaaacttgggggaaataaattaactgatatattaagctctttcccagtctaactttctctaaacctaaaatcacaaaaggaggtcaggagaaaagactcttagttagctgactacatcttgacatttctaccagcttggtgaagcagcagggaaagagcgtgcatccattcgtcaaggctggagggcaaaggcccagaacttcctaattgatataagcagattctcctttttttattattattatgctttaagttctaggatacatgtgcagaacgtgcaggtctgttacataggtatacatgtgccatggtggtttgctgcacccatcaacctgtcatctactttaagtatttctcctaatgctatccctcccctaggcccccacccccaaacaggccctggtgtatgatgttcctctccctgtgtccatgtgttctcattgttcaactcccacttatgagtgagaacatgaggtgtttggttttctgttcctgtgttagtttgctgagaatgatggtttccagcttcatccatgcccctgcaaaagacatgaagtcatccttttttatggctgcacagtattccatggtgtatatgtgccacattttctttatcaagtctattcttgatgggcatttgggttggttccaagtctttgctattgtgaacagtgctgcaataaacatacatgtccatgtgtctttatagtagaatgatttataatccttagggtatataccaggtaatgggattgctgggtcaaatggtatttcttgttctagatccttgagggattgccacactgtcttccacaatgtttgaactaatttacattcctaccaacagtgtaaaagtgttcctatttctccacatcctttccagcatctgttgtttcctgacttcctgttttttttttgagacggagtctcactgtgtcaccccggatggagtgcagtggcacaatctcggctcactgcaacctccacctcccaggttcaagcgattctcctgtttcagcccccagagtaggtcagactacaggcatgccacaacttctggctaatttttgtatttttattagagacgaagtttcaccatgttggtcaggctgctctcgaagtcctgacctcaggtgatccacccacctcagcctcccaaagtgctaggattacaggcatgagccactgcgcccggtctgtttcctgatgtgttaatgatcgccattgtatctggtgtgagatggtatttcattgtggttttgatttgcatttcactaataaccagtgctgatgatcttttcttcatatgtttgttggctgcattaatgtcttcttttgagaagtgtctgttcatatcctttgcccactttttcatggggctgtttgttttttcttgtaaatttgtttaagttctttgtagattctggatattagccctttgtcagatggatagattgcaaaatttttccccctttctgtaggttgcctgttcaccctgatgatagtttattttgctgtgcagaaactctttagtttaattagatcccatttgtcaattttggcttttgttgccattgcttttgatgttttagtcatgaagtctttgcccatgcctatgtcctggatgttattgcctagattttcttctagggtttttatggttttaggtcttacgtttaagtctttaattcatcttgagttaattcttgtataaggtgtaaggaaggggtccagtttcagttttctgcatatggctagccagtccttcttgatttagtatttgtgggttttaaaaaaggagtttcccaaaatattcagttaaacttttaagtgacttacgtgtatatctaaatacatgatcagttaatatttgtcttaaaggggttttctttgttcttttcttattataggaaggttaaacaatatgcttatttatgccatagcttcacaaacaggaaggaggttttaaatggtttagttccacaatttgagtagatgcatatttaaagaaacgttgttgcataataaatactgcctcttcctaaaatgcatcatgccacagccaattttggaaaacacaaatatgaggtgagtgtattttgaaaactatgtgaatataatagatcyttaattcatatttgtggattttatgggaaatacttgttttctaaggcatctgtcttgcaaaaagtcagtttctgctatgaaggatgttaaaggggatatgtaggttaaattctgtttctgagctttgcttccagagtaaacacccaacttacttttgccctaaagtattttattgttctagtagagaagactaacaacatattctaaaccactaagtaatttatgtaaacttcgcttacaaactacacttgtgtgacacttatatgagcaaaagcattttcatatttcttactatatcattcaattcttgcttaccccaatggaagtgactttatgcccctttagagacaatggaaatcaggtacttcgtgatttctcttaaaaaaaaaaaaaatgaactagaaagctccaagtttggtgaatctggaacctgggtattccagttccagttgtagcccttcctccctatccatcactcctgtctgcatgtaattatgcaatacattgaaaagattaaaagatgggtcttggactcaggcagacctgggtcaaatccagattctggcactgcccagccattgcccctgggcaagccattttcctctttgaacctcatttgtgaattaagctaaaaatagtccccacccccatgggactgtgggaaggattaaatagaataatgcatgaaaagcaaatagcagaatggtccataaatgttaaccattgttatgttattatgtaatctacaaagtacgtttagttacacttcatgaaatactttcagtttttcaaagacaccactaatacatgggaawtcaaaccctgaaaattaatttcactttagcagtaaagtcacatgccagatggaaaggatagtatttcatgaacaaagatcttacttttgagatttggtcttacttttttctttttcttaagggagaattatcttgtgttttttgttttgttttgttttgagatggagtcttgttctgtcacccaggctggagcgcagtgacgtgatctcggctcactgcaaccttcacctcccgggttcaagagattctcctgtctcagcctcccgagtagctgggactacaggtaygtgccaccacacctggctaatttttgtatttttagtagagacaagagttacaccatattggccaggatcttttgctttctatagcttcaaaatgttcttaawgttaagacattcttaatactctgaaccatatgaatttgccattttggtaagtcacagacgccagatggtggcaatttcacatggcrcaacccgaaagattaacaaactatccagcagatgaaaggattttttttagtttcattgggtttactgaagaaattgtttgaattctcattgcatctccagttcaacagataatgagtgagtgatgccacactctcaagagttaaaaacaaaacaacaaaaaaattaaaacaaaagcacacaactttctctctctgtcccaaaatacatacttgcatacccccgctccagataaaatccaaagggtaaaactgtcttcatgcctgcaaattcctaaggagggcacctaaagtacttgacagcgagtgtgctgaggaaatcrgcagctgttgaagtcacctcctgtgctcttgccaaatgtttgaaagggaatacactgggttaccgggtgtatgttgggaggggagcattatcagtgctcgggtgaggcaagttcggagtacccagatggagacatccgtgtctgtgtcgctctggatgcctccaagccagcgtgtgtttactttctgtgtgtgtcaccatgtctttgtgcttctgggtgcttctgtgtttgtttctggccgcgtttctgtgttggacaggggtgactttgtgccggatggcttctgtgtgagagcgcgcgcgagtgtgcatgtcggtgagctgggagggtgtgtctcagtgtctatggctgtggttcggtataagtctgagcatgtctgccagggtgtatttgtgcctgtatgtgcgtgcctcggtgggcactctcgtttccttccgaatgtggggcagtgccggtgtgctgccctctgccttgagacctcaagccgcgcaggcgcccagggcaggcaggtagcggccacagaagagccaaaagctcccgggttggctggtaagsacaccacctccagctttagccctctggggccagccagggtagccgggaagcagtggtggcccgccctccagggagcagttgggccccgcccgggccagccccaggagaaggagggcgaggggaggggagggaaaggggaggagtgcctcgccccttcgcggctgccggcgtgccattggccgaaagttcccgtacgtcacggcgagggcagttcccctaaagtcctgtgcacataacgggcagaacgcactgcgaagcggcttcttcagagcacgggctggaactggcaggcaccgcgagcccctagcacccgacaagctgagtgtgcaggacgagtccccaccacacccacaccacagccgctgaatgaggcttccaggcgtccgctcgcggcccgcagagccccgccgtgggtccgccygctgaggcgcccccagccagtgcgctyacctgccagactgcgcgccatggggcaacccgggaacggcagcgccttcttgctggcacccartrgaagccatgcgccggaccacgacgtcacgcagsaaagggacgaggtgtgggtggtgggcatgggcatcgtcatgtctctcatcgtcctggccatcgtgtttggcaatgtgctggtcatcacagccattgccaagttcgagcgtctgcagacggtcaccaactacttcatcacttcactggcctgtgctgatctggtcatgggcctrgcagtggtgccctttggggccgcccatattcttatgaaaatgtggacttttggcaacttctggtgcgagttttggacttccattgatgtgctgtgcgtcacggccagcattgagaccctgtgcgtgatcgcagtggatcgctactttgccattacttcacctttcaagtaccagagcctgctgaccaagaataaggcccgggtgatcattctgatggtgtggattgtgtcaggccttayctccttcttgcccattcagatgcactggtacmgggccacccaccaggaagccatcaactgctatgccaatgagacctgctgtgacttcttcacgaaccaagcctatgccattgcctcttccatcgtgtccttctacgttcccctggtgatcatggtcttcgtctactscagggtctttcaggaggccaaaaggcagctccagaagattgacaaatctgagggccgcttccatgtccagaaccttagccaggtggagcaggatgggcggacggggcatggactccgcagatcttccaagttctgcttgaaggagcacaaagccctcaagacgttaggcatcatcatgggcactttcaccctctgctggctgcccttcttcatcgttaacattgtgcatgtgatccaggataacctcatccgtaaggaagtttacatcctcctaaattggataggctatgtcaattctggtttcaatccccttatctactgccggagcccagatttcaggattgccttccaggagcttctgtgcctgcgcaggtcttctttgaaggcctatggsaatggctactccagcaacggcaacacaggggagcagagtggatatcacgtggaacaggagaaagaaaataaactgctgtgtgaagacctcccaggcacggaagactttgtgggccatcaaggtacygtgcctagcgataacattgattcacaagggaggaattgtagtacaaatgactcactgctgtaaagcagtttttctacttttaaagaccccccccccccaacagaacactaaacagactatttaacttgagggtaataaacttagaataaaattgtaaaattgtatagagatatgcagaaggaagggcatccttctgccttttttatttttttaagctgtaaaaagagagaaaacttatttgagtgattatttgttatttgtacagttcagttcctctttgcatggaatttgtaagtttatgtctaaagagctttagtcctagaggacctgagtctgctatattttcatgacttttccatgtatctacctcactattcaagtattaggggtaatatattgctgctggtaatttgtatctgaaggagattttccttcctamacccttggacttgaggattttgagtatctcggacctttcagctgtgaacatggactcttcccccactcctcttatttgctcacacggggtattttaggcagggatttgaggagcagcttcagttgttttcccgagcaaagtctaaagtttacagtaaataaawtgtttgaccatgccttcattgcacctgtttctccaaaaccccttgactggagtgctgttgcctcccccactggaaaccgcaggtaactacttgtaattactgcccatgacttaatgtagaatgatacaagaatgacatgcacagattgcttaaccctttcatttgcctttgagtctgctgctgcaaagctgcatctctcctgacacttgtgccccaaatcagttctgcctgctcttagtatagctcaactctccctatggttattgttctgtgttgttacctcagaaacactgactcacagaagcggagttaaggggatatgtttttttctctccacgtgcacccaccacccaccttccagttctacttgtttcaaaactgtttatatttctgtcttggccatgtgttacagtggagctctttgtactgcatcagggcttggcattttagggataaggaagatgttcttatgaggaagctactcagacatggccccgtaattctgagggaaaattcaaaaggcattggtcatggggagaaaagctggagaacacataactgatggatacctcatgaactagaaacagaattttaaccccttttccttctttcctttggtccctgttttcttctcccactgactctcctcgattcagtgtaaaccaaggttctgagtcttagcactgttagcattttggaccagataactctttgttatgggggctgcatcattgtatgtgtagcacctctggcctctgttcattagatgccaatagcaccccctgcttataacaagcaaaaatgtttccagacattgcaaaagagcccctgaggtgcgaattagcccctggttgagagtcactggtagaaactgtaaaaatctcagcagatacatacattctttctaatgcaagcgcttgattgtgcagagccttagagagggattttcacagttcacctaggcagtaacagaccctcaccagcactctttccattccatcatgctgccttctaaacttgttttctagctgcccaaatagtgatcatgaaatgttaagaaggctttaagtctgtacatgaattgtttgagagggtttatcaatggaggtgaggcctgtgggccatgactcctgtttgtgaagagattataatactgtcaagaggcacgttaggggaaatcacaaaagtaaacacatttcttctcccagcccctttctatttttgcctgtgtgtctgagccagagcttggcccaggtttgatgaagtggatcgtcctccttggcaacgccaggctagagcagatcagcctgcagggttcattgccattccactggctcatgaagctgactccactcccctcttcctttctgttgcagccaaggtccccaaccagaaaagcattggccttctctgcttcctgtcaactcaatgatgggatgtttgggtgagcaccgagctatcaggagaaggttaggcgcctgtgattttggaacatgccatggcaaattggagaatgtgtgtcattcagtgcttttacttttttccaagggttttcatacctattgaaaacccttattacacattatcaccttctctttctactgctattatcacattctctttctactgctctggtctccacactcagagatttgggcagcttctttggctaatattcatgctccctgtagcctcataagatctcagacatggaagagcccatagaaagtatttaacatctgatgagactgaaacgctgtgaggtgaagggcttgcccaaggtaagcagccaaggatgtcagagtgggactcaagccagggaacccaactgctattccaggaactgctgcattctctccaccacattagcattgcgttctttcctcaccctcaactggggctataacataacacattcatttcagccaatatatttttcttttgtccttaacacaaaatttagagcataaacaaataatctgcaatagagacaaaagaaataattgttcatttaactcaacaagcatccactaggatatcttctgcatttagggaagctgggagattccttagctctttataaccagatgtcggtgttgtatatatactcttttgcctaaaggaatgtctaatgtaatttctgttaaaattcaggtattaatgttaattcagattcccagctaaaaggagagtttaaccatattcacgttcctttaggaatactgtagacacaagaaccttgattagttttaagggtcctgataagcaagagcattctaggcatatcttaatcctttgctttctacctctttggtgtgttgctttgtttcttttgaggggttggcttttgtcagtgtcccttcgtctctctgtttgctgacatgctggccacctaaggtttgtgttgtattcctcatcgtgagttttttttttgcctggacagcaagttctcagagtctgtcaaataagaagaacttttttctaagatgcaagctgagaggtgtgaacagtggcaggacagggtgagcctccccactgcaataattaatgggataaggaatctggagaaaggggagcttgagaataggaactgtctttacatgattcttagaatgtttcttatggtgaacctattgccaaatggagcctaaaccagaatcagtcagaaagtatttatggagcacctactgtatgcagcatgagaaaagtataggtttccatttctgccttttggatcatgatattaaggatactaagcagataccttttatggaatcttactaaaagttagtgactatgttagacacctgttaggcgttatgtcctcacaactgtatgatgtaggtagcataattgtcctcatctaacaaatgagggagctgaggctcagaaagcttcagtaactttccaaagccatacaaccaactagttgcagagtcaggacgagaacccaggtctctgtgattccaggatccatggagcctagcacccaggcaaaccaggaagcagcacgaggtagcttagaatctgygccagaacaagtgtaagaactggaaatgcaatactttgttgagagaagacggagactgctgtgggttgaggcagggaggaatgttcccttccaagcatgtgactgcagggtttctggggactgacacaaaaaaccaatcactgaagtgcctagtttgcttctccaagtctttgttttgtcttctcatcagagaatcagaccaaaatggaaagaggatatgaaactctaaaacgaacacagcagagtaaagcagaaacacaggctgccctacgtcctggcactctttctcagctccaaagttgggaaggcctcctaaattgagtgggtagccagaccttatggaaatttgataggcctgggtagccatataggtatgttttccatcttgagctagcattctagatcaaaggagatgattttctgacagcagagagcaaggaagcttaatatgctttgaatgatactttccattgacagtataacctctactaaattcagtctgtgctaatccatacttcactgacagtgcaaatataatttgaaggagggatttttctaaatgcgtaagagaacaaacttcctaagcactttcaagaacttgagaaattctggtgttttgtgaataataggaggcagggtgaggtgaaaagagsccccctccaacctcccacccaccaccccactctctctctctctgaagttgggtgaggcggttttcttcagccgacttccgtttactcatctgtaatttgaggccagtacaggtggtatctaagctctgctcccctctgaatttatacagttgttaatttacaggctagagataatcatttatatttctaattagagttgatgacatttgccatataaacaatggttgaatattctgaaggttgtcagcctgcagaagagaatgctgtgaagtactatttggtgcatgataattgcttttcagtatgatctaggggggaaaaaaacagatttctcggttctgcatgaatacaagaaggcaagcagaactttacagaaaggcagattctagctcgggtataggaagactttccaaagagcgaaataaatgatctatcagaattgtgaacctcccgtttttggaagcattcaagagaagcccagatgaagctgaagctctgttcaggatgaagcacaaggcctgcactgagcaggaggctgggctaggctctttccaaatctgtgatcctatgtccttgaaaacagcagacctgaatgttcttaaagtgtattcaaactgttccctaattccagctggccttctccccaattcctctggatttcagaggtttcactgcattcctaaatgggaaacctcygggggaaatcagtatctcaacaacctttggccatggggagaaatccagaaatagagcaataaggttaagcagttttccaaactattagaccttttcatcagctgctcttcccatgccttttgcaaatgacctactaactcccagagcgagaataatgagagctgcaaagtcctctctgcaaagactattacatccttctccaccctcggaatcattgcacttcctctggtctttttgtcacccctacagggcaggaaggaatagaggcaggtccctggctagcactggaacacttcaaagcttctagccccaaagcctggagacctggggtctgtcatagcccagccactaagagtctgggtaacctcaggcaggccacttcccttctctagacccatttcatcacctctaaagagagatgctttggtttatatgggtcctctgtttccttctttctctaaaattctgtaagatattaggaagtcttcagcaccacacatctgactgcattgcttttatttttaaaagcatatttttttctttttaaaaggataatggataattattataggacatttaaaagtatatgaaagtataaaatgagataaatcccacttaatgtcaccacctaaagataaccatcaataaatttgatgatgtatatgcttccagtctttgttctaagcctagctatacaaatgtacataaatatatttgtaaatgaaaatagaattatattatttatactgttttggatccactgctgatacttttacaaatgttcccttgaacttacttttatgtatactgtgatacagatgttataattcctgtttgcccattggcctgattttatagtgttcaggtacgaaagaatcaccactcccggagagtctgaatcacaaggtctgagttggggtctaagaatctgcattttagcaagtttctccaagtttttccaacacagatcgtccatgggccacattttgagaaataaggctacaaagatataaactttgtgtaaatcagagagaatccctccccctgccccttgctagtggatgaaaaagatgtttctatacttgccttgctgaaagcacactttctgcacctgggctctaatctgctttcggagcagaggaaactaaccactgaacacccaggacagagttcttttgacattgttgaatgcctcctacccagcctgttgatttgtgtgaaaataagtctattcaggtcacacagtgaccaataacttctgtttggaaaagtgcaacagtaggtttttattctcatagagagcctcttttgataatagtaactgctaatagctacgaagtgcttcttatgagccaagcattatagttggcaattctggtgcatgctctcatttagtattcacacaataatatgctattatgtttgccttcattttataaattggaaaactaagactttcagaggtaaactaagctgtccaagatcacataacccactggagtgaaacccaggtattctgaaccagagtctgtgtgtgtgttttgccactagaataggccgtctgtcttttctcagttggagatcaggtaagaaagaaggaaggagaagattatgagaggttatttttaatgggtgcattttgttctaattctccatggaatcttctcagaggggcctgattaatgtatgccccttgaga

SEQ ID NO: 8798 - DNA, 26471 bp, Homo sapiens
gtggcgtctgaacctagacgtcccttttggagacagctggacaaagccctattctccgcagccccagcctctatcctgaggcctctgggagctgcgtgacggccagcatggggtgctgatcatggtcaaggaggcaggtctttgccaggttgccccatgcagccacccatcctcagcatcctaacttgagggggcaggagagggctttgtttttataatccggattaaatttcccttccctgggcacaagtgcctcatgagggcccggggctgctggttgggagggaaagcatccccgtttttgcagtgaggaggccggccgagggctggggttccacttagacccttggcagaatggctgttgaggggcaggcgctgcccagtgcccacgtctggaaagctaattcccgggtggacgctgaacatacctgctgagagactctgtcccctggtttccaggacagttgtcacaagctgagtggggggggactcccaggacttgagggacccagtcccaccccaaactgctccccctcccccaaattccctttctcctcctgctctttctccccgctgtgcctcccccagttacccacagaagtgcctgcctctccagcgctcacagaacacacaaaaagggacaggaattggtcactgggtagtggccgtggctcctgacgatccagaccagcgtctggcccaagccattcagaggtggggtctggggcctgggggttttgtgtcgtgacactttgtctcaaggagattccacatagggatttgaattaggctttctgcttgccaaggcctgtggcatctgagcctggctgagggccgggcaagcctcccctgagcctttggaagccgagttcactctctgcctgcccaggggagcaccggcttggttctgggggctcctctaacatctcaggtttttatcttgtcttaaatttctttctaggaaaaaacccttccctgccaaaggtgactgtgttttctgccgccgaaggagggcccggtccctccaggctcagtgtggcttctccctgacccccgccctagaacttttgccagtgccttttctgaaactcctgtgtcccgggccccccaggcggagaaggatatgccggattctgcctggggctgggctctaggagaccccaaatttgacaccacagaaagcaaataaaacacttgaaatacgcatacatttcctgtgtgtccttttgtggggctggagttcagctgggtgcccggggatagaggggaccccgtgtcactgggtttctattctcggtggtgctgggcccagggcagctggtgaccatgtgctgagtgagcgagaggaggggaattctgcctccagtggtctccttcctcaaaatcagaggcctggcccagcgcagtggctcacacccggaatcccagcactttgggaggccgaggtgggtgaatcacctcaggtcaggagttccagaccagcctggccaacatggcgaaaccccgtctctactaaaaatacaaaaattagccaggtgtggtggcacgtgcctgtaatcccagctactcaggaggctgaggcaggagaatcgcttgaacccgggaggcggaggtcacagtgagccaagatcgcaccactgcactccagcctgggcaacagtgtgagactcagtctcaaaaaacaacaacaaaacccgcggacctttgttccaacacacagggaggttgaggaacttgcctgtggtaacacaggcactggggtttgagcgatgatctgcatcaacctccagggcatacaaaatccccatcatggctgggcacggaggctcacgcctgtaatcccagcactttgggaggctgaggccggtggatcacctgaggtcaggagttcaagaccaggctgaccaatatggtgaaaccctgtctccactaaaaatacaaaaattaggccaggcgcagtggctcacacctgtaatcccagcactttgggaggccgaggcgggcggatcacaaggtcaggagatcaagaccatcctggctaacacggtgaaacctcgtctctactaaaaaatacaaaaaattagccgggcacggtggcaggcacctgtaatcccagctacttgggaggctgaggcaggagaatggcgtgaacccaggaggcagagtttgcagtgaaccgagatcgcgccactgcactctggcctgggcaaaagagcgagactccacctcaaaaaaaaaaaaaaatacaaaaggtagctgggtgtggtggcaggcacctgtaatcccagctacttgggaggctgaggcagcagaatcacttgaacccggcgggtggaggtttccgtgagctgagatcacgccactgcactccagcctgggcgacagagcaaacaagactccacttcaaaaaaaacaaaaaatccccatcattctgacaggggatgccatgccattgccacctttacagacagggaaactgagtttccaccagttgaagccccttgtcccctatgtcacggccagggagagtaggggtgggaatgtgaacccaggcgggcttctctggagcggagggccttgaagaacacaaatggacatgttcattccctacgcctgtcctcagcaggaatgaagacaccctggtctctggctctctgagaataaacttttgacaccaaagggacttggacaacagttaggaagatgtcctggagcaagtggaccccgtgggttgggggaacttcttggactcacagaggactgagggttcttgcacccccagtggaggtattcatatctgggtggtctttcccatagggtcgactcttattattgttatttaatgtagagacagggtcttgccatattgcccaggctggtctcaaactcctgggcttaagttctctacctgcctcggcctcccaaagctctggaattccaggcatgagccaccatacccgtccctttgctgtcttgagccttagtttacccatttctcgtggggcttttgtggcaattcaatgagattctgcttttacagcccttaacttggagcctggtgccctgtcattgctcagtaaatacaatgatcagggtgtgggctctcgcttataatcccagcactttgggaggccaaggcgggtggatcacttgaggtcaggagttcgagaccagcctgggcaacatggtgagaccccccccccccatctctacaaaaaatacaaaaattagacaggtgcagtggcgcacacctgtagtcccagctactcaagaggctgaggtgggaggatcacctgagcctggggaggtcaaggctgcagtgagtggtgatcgtgccactgcactccagcctgagtgacagagtgagaccccatctcaaaaacaaaaacccggtcgggtgcggtggctcatgcctgtaatcccagcactttgggaggcaaaggcagatggatcatttgaggtcaggagtttgagaccagcctggccaacatggagaaaccccatgtctactaaaaatccaaaaattagccagccatggtggtaaacacctgtaatcccagctactcgggaggctgaggcaggagagtcgcttgaaccagggaggctgaggttgcagtgaactgagatcgcgccactgcactccagtctgggtgatagaatgagactccgtctcaaaaaaaaaaaaaccccacaaaataaatacagttaccatcacctcctcttccaggaagccctcctggctacctaggcatctcctctgactcctacagctgcctgggtgtccccattgtagcactctgggtggtaattgacagcctctgtgagagggtggatgggtatgtgtggggccccctctgtgtcttctgtgcccagcacagtgccagggacacagtagggaagcaataaactgctgggaggagaggtgagtgctgtgggtccactcctgaggccagccaggggctcagcaaggcaccaatgcctcctcccaggagtgaaagatgctggaatcaccaggctcctcctgcagtctggggtccccacctaaggaggcccctcaccccgtggctgtcccagtcattcaggaagtgtccactgtgggctgagccctggactggggacacagcaaggatcaggcagctgggagtacagcctggaggtccccccttgggatgagggctgcacaggcagttaaagggtccaaggatcatcccaggatatggctgagaggctgcaagaggctccatcccctagaggccccctccgccctcgcctgggtgctcccagccttactcaaaggagcaggtcggcccggtgcgttgtctcacacctgcaatcccagtgctttgggaggccgaggcaggcggatcacttgagcacaggagttccagaccagcctgggcaacatagcaagattctatctctacaaaagtaaaaataaatcttataaagtagctgtggactgggcacagtggctcacacctgtaatcccagcactttgggagaccaaggtgggcagatcacctgargtcaggagtttgagaccagcctggccaacaaggtgaaaccccatctctactaaaaatacaaaaattagccaggcatggtggtacacatctgtaatcccagctactcaggaggctgaggcaggagaatcccttgaaactgggaagcagaagttgcagtgagctgagatcgtgccactgtactccagcctgggtgacagagtgagaccctgtatctaaaaaaataaaataaaaatgaaaagatgaggatcttggcctccattcttgcccttccactccattccaactgctgagcctctcacaccctctgtggctccctttcgcctacaggaaataggatttctgtactgggcatttgaaccccattcccttgtttctgctgacccccagcagtctcaatatcccctacttcctcttcccagaaccaccctccccaaagcccttatcgatgcttggaggattcctatgcatccctcaaaatccaaggtttgggaaagatgctgcagtggtctcaagacatcctcagtgtgatgacagcctggggtgggggtaagggggcaaagtacagcaccagaaatcccaactgagtccccccacacgtcttccaccttcccaccctctctttcgggttctggctccctgcctccaggcaatcaccagtttttaccaggagtgcctcagacctgcccggacatgtccaagtcccctagaagcagggaggggtgggtgaggctgtcacctctcccttccctgtatggtgctgataagggcgtggggaggcagagacaggcagagatagacatgatgagagacaggcagaaatggagggagagccagggagagagagacacaaagagaaaaagtggaaattctccagatattttgtttagggtgaggacacggagacacagagagggacttagccagctgaggatgacgatttgggatgttaggtcacccaggtgctgtgctgtgtaactcaggcacagagctgccctgttccgagcctcagtttacccctgtgactcagagcagatctccatacccccatcacagggctgtgtatccgagctcagccagagcctggcatgcagtaggtgcttcataaatacacactgtggacagtagaattatgatgggagcgagcgtgtgaactgggttgctaatgtggagcgtgaagrgggaggcccagggttactcggccaatgggttccgggcagcaagcacgtgggggaagcctcagctgaccacttcctggccagtttatgcaggaactcgcacagccggtccctgaggctgagcccaccacttccgccccccatggtcccagccctgctgactcatactcagctgccacggtccgctttccctgctgagcacgggggtgggggcgggggggaagagggggagggaagggcacctgaccgaggccagaggcccagaaaggacagaaggtcatggctggggagaagcaggcaggagaaccgagtcttggccttaactggctggcaacgtaaaacctgccctccacaaggacaagatgaaaacttggggatttggaggggacaacaaattagactcaatcacaatttcaaacttttggatgtcaatatatccatcaagaaattgaaaagaggcctggcatggtggccgatgcctgtcatcccagcactttgggagaccaacgtcggaggatcacttgaggtcaggagttccagaccagcctgggcaacgtggtgagacccggtctctacaaaaaaatttaaaaattagctggacaggggccaggcgcagtggcttacgcctgcaatcccatcactttgggaggccgaggcctggatgacagtgagagactctgtctaaaaaaaaaaggacaggtgcggtgcttcgcgcctgtaatcccaacactttgggaggccaaggcagatggatcacctgaggtcaggagttcgaaaccagcctggccaacatggtgaaaccccatctctactaaaaatacaaaaattagccaggtgtggtggcgcatgcctgtcgtcccagctacttgggaggctgaggcaggagaatcacttgaacccgggaggcagaggttgcagtgagccgagatcgtgccattgcactccaggctaggtgacagacagaaaatcttgtctcaaaaaaaaaaaaaaaaaaaaacccaccagagataaaaatgggcagcagatgacattgtttacataatactgaccacaaacttgatgtcctaaaagaacagggacttctctcagagttctggaagccagaagtccgaaatcaaggtgtcacagcaggactggttccttctggaggctgtcaggactcagaatgtgatactccaaagtatggctccttggcaaaaactttgtggtttttgtttttagagacagggtcttgctctgtcacccaggctggggtgcagtggtacaatgatagctcactgcagcctctacctcctgggctcaagcaatcctcccacctcagcctcccaagtagctgggactacaggcatgcgccaccacacctggctaattacttttatttttgtagagatgaggtctcgccgtgttgcccaggctggtgtcaaacttcttcttcttcattttttgtttttgagatggaatctcgctctgttgcccaggctggagtgcaatggtgtgatcttggctcacagcaacttccgccttctgggttcaagtgattctcctgcctcagcctcccgagtagctggaattacaggcatgtaccaccgtgcctggctaattttgtgtttttagtagagacggggtttctccatgttggtcaggctggtcttgagctcctgacctcaggggatccacctgcctcagcctcccaaagtgctaggattacaggcgtgagccaccgcgcccagcsaagacagttattttaaagtatttgtctagtgagtctgatgtgtgggcttccttagggatggtttctgtctgttaattttgttccttaaaatgcgccacactttgctgtttctctgtatgcctagtgatgtttttgttgttgaaaagcgagcatttgaatattctaaattatggtaactccagaaatcagattctccaccttcctgagagttttgtgatttttgtttctgtttttaattatggaaggcagtagccatctctttgtttagatagttttccaaaccgcttttttttttttttttgcaaagactgtattccggccgggcccggtggctcacgcctgtaatcccagcactttgggagtccgaggcaggtggatcacgaggtccggagatcgagaccatcctggctaaaacggcaaaacccccctctctactaaaaatacaaaaaattaggtgggcatggtggcgggcacctgtagtcccagctactcgggaggctgaggcaggagaatggcgtgaacccgggaggcggagcttgcagtgagctgagatcgtgccacggcactccagcctgggcgacagagcgagaccctgtctcaaaaaaaaaataaaataaataaaataaataaataaataaataaacctgttccccaaatatatatatgaaattaaaacatgcgtggtcatgatcaagttctaattacagacaaagacttccttgagattggggagaacctgccttggactacggggaccacttcaactctcttgggaatgatttttctttaggtgggtgctggataggggtgtttgtgattttattattaatacttttgtgtgtgcctgaaagatttcacaatgacaaataaaactgagaggaaaaggtttggcagttccccattaagttcaatacagggttactctgtgacccagtaattccactcctcagtagagagccaagtgaaatgaaaacaggtgttcaaacaaaaacgtgtacacccacttttacagcagcattcttcatcaaggcgaaactacagtacaaatattgtaagattccatttctgtgaaatgttccgaataggtaaatctataaaggcagaaattaggccaggtgcagaggctcatgcctgtaatcccagcactttgggaagccgaggtgacaggatcgctggaggttaggatttgaagaccagcctgggcaacatagcgagatcccatctttacaaatttttttaaaaattagcaaggcactggctgggtgaagtggctcacgcctgtaatcccagcactttgggaggccgaggcgggtggatcacctgaggtccggagttcgagatcagcctgggcaacacggtgaaacccccgtctctactaaaaattcaaaaattagctgggcatggtggtgcatgcctgtaatcccagctactcgggaggctaaggcaggagaatcgtttgaacccaggaggtggagaytgcagtgagtcgagatggcgccattgcactccagcctgggcaacaagagtaaatctccatctcacaaaaaaaaaaaaaaaaaaaaagcaaggcacagtggcatcaggctggggtgggaagatcacttgagcccagccattcgagaccaacctgtgcaacacaggaaaaccccattctacaaaatagtaaaaaattatcagggcatggtggcacatgcctatagtcccagctactcgggagagtgatgggggaggatcacttgagcccaggaggtcgaggctgcggtgacctatgattgtgccactgcactccagcctgggctacacagccagaccctgtctaaaaagaaacaaaacaggcaggacgcggtggctcacacctgtaatcccagcactttgggaggccgaggtgggcggatcacctgacatcaggagttcgagaccagcctgtccaacatcgtgaaatccccctctctactaaaatacaaacattagccgggcatggtagtgggtgcctgtaatcctacctactcgggaggctgaggcaggaaaattgcttgaacctgggagatggaggttgcaatgagccgagatcgcgccactgcacgacagcctaggcgacagagcaagactccatctcaaaaaaaaaagaaaaagaaaaaaagaagaaactctcattgatggagtgttcattgatggagcactttttgggagtgggttgacatgctcacaggtgtttttaacctcacctcgtctctgaagaggtgcagataaaagtcacctggtgaggaaaatgcctttttaaaaacaatttttagagggccagcacggtgactcacgactgtaatctgagcaatttgggaggccgaggtgggcggatcacttgaggtcaggagttcaaaaccagtctggccaacatggtgaaatcctgtctctactaaaaatacaaaaattagttgggcatggtggcacatgcctgtaatcccagctactcgggaagctgaggcaggagaatcactttaacccaggaggtggaagttgcagtgagccaagatcgcgccagtgcactccagcctgggcaacagagcgagactctgtctcaaaagaaaaaaaaaagagatggggtcttggggtctcactgtgttgcccaggctggtctccaactcctggcctcaagcaatcctcctgctttggcctcccaaagtgctaggattacatgcctgagccactgtgttcagccagggtgtcccttttctgagactgcattctttccaccttgcccaagtattgcaggagaaccacaggccccatgctgtgctggcgaaaatctcatctcatgctggcctgttagggtggccatatcctctcatttcagaggctctgagggagatggaacaggctcagcggctggctgcttggggctctaaccccagccctgctgtcttctggctgtgtggccgtgacgagcccacctctctggcctcagtttgtcatctgtgaaatggacataatctatccaccacatcaggctgtataaagattaggccaggtgtggtgcctcacacctgtaatcccagcgctttgggaggctgaggcaggcagatcacctaaggtcaggagttcgagaccaacctggccaaaatggtgaaaccctgtctctaataaaaatacaaaaattagctgggcatggtggcatgtacctgtaatcccagctacccaggaggctgaggcaggagaatcgctggaacccgggaggcagaggctgcagtgagccaagattgcaccactgcactccagcctgagtgacagagcgaaactccgtctcagagaaaaaaaaaaaaaaaaaagatatgtccaagtcctaacgctcagtatctgtgaccttatttggaaagaaggtctttgcaaatgtaattaaactaaagatcttgtactgagatcattctgaattaagaatggacctgtggctgggcacagtggctcacacctgtaatcccagcactctgggaggctgaggtgggcagatcacctgagatcaggagttcaaaaccagcctggccaacatggcgaaaccccgtctctactaaaaatacaaaaaaaaattagctgggcgttgtggtgcacacctgtaattccagctactcgggaggctgaggcaggagaatcacttgaacctgggaggctgcagtgagccgagattgcgccactgcattccagcctaggcaacaagagtgaaactctgtctcgaaaataaaaacataaaaagagtggacccatggccaggcacagtggctcatgcctataatcccaacactttgggaggccaagatggaaggatcgtttgaactcagccgtttgagaccagcctgggcaacatagtgagacccctgtgtctaaatacaaacacaaacagaaaacaaaaagaacccgggctggctgcggaaccccctagatggcacaggcacatcctggctttcgaggacagtcacgagcatgagacagcatttcttcttgtcctcggggcctgcaggaagtttttaagtaatctgcttttgtgcctcttccaaatctcctcctatgaccctgtttaccttacatcacaagaaacaatcaataaaagtggtttgtgttcgtgagtgccgtgtgtttgacaaaggcgttgataactgagagctggtagtggaggggggagattttgggagattggggccctgccaggtggacggactggcctgacctccrgcccctgygctctgtttacttccatcccagctccacctctggggacccatggaagctgtcggtgaggaacacaggatccgacctgctgagctcatctctggccacctgcctgcatccgccccatctctcctctcagcttggccatgaggcgggctatgaggtcattggttaaagatttggggaagcagagccaggcgagtggccagatgtggtggctcatgccatcacaggatcccagcactgtgagaggacaaggaaggaggatgcttgagctcaggagttcgagaccagcctgtacaacatagcaagacccccgtctctacaaaatataaaattagccagttgtggtggcacgcgcctctagtcccagctactcgggaggttgaggtgacaggatcccttgagcccaggaggtcgaggctgcagtgagtgggtaacagagccaaaccctgtctctaaaacaaacaaaaacagaaacaaaaagtacactacttactgtcctgcttctcaccattccagcctggtagtccttttttttttttttgagacagggtcttgctcagttgctcaggctggagtgcagaagcgtaatcacagctcactgcagccttgatctccaaaaagactaccagcttggctgggtgtggggactcatgcctataaccccagcattttgggagccagaggcaagaggattccttgagccaaggagttcgagaccagcctgggcaacacagtgagaccctatctctaaaattttttttttttgagatggaatttagctctcgttgcccaggctagagtgcaatggtgcaatctcagctcaccacaatctccacctcccaggttcaagcaaaattctcctgcctcagcctcccgagtagctgggattacaggcatgcgccaccatgcccggctaattttgtatttttagaagagacggggtttctccatgttggtcaggctggtctcaaactcccaacctcaggtgatctgcctgccttggcctccctatctcctcattgggggccataggattaaatagcttttttctttttttatgagacggagtttctctgtgtcccacaggttggaggcagtggcacaatcacggctcacggcaacctccgcctcctgcctcagcctactgagtagctgggattacagtcatgcgccaccacatctggccatcttgtgtgtttgagtaatctcggtatatatccattttgtctatgaagctcgttaatttgggccccaaagcacccgctggcaatggcctttaagtgcgaaaatcctggcattaggcgtcccccaccttttttttttttttttgttgggacggatgtaggtgtgtcgcccaggctggagtgcagtggcgcaatctcggctcactgcaagctccgccttccgggttcacgcctttctcccacctcagcctcccgagtagctgagactacaggcacccaccaccatgcctggctaatttttttgtatttttagtagagagggggtttcaccgtgttagccaggatggtcttgatctcctgacctcgtgatccgcctgacctcggccttccaaagtgctgggattacaggcacgagccaccgcgcccagcctggtgtccttatttcttgggaaaggatacagagggtcagagaggcgccccagcttgtgcaggaatgcattcctgagatctggcctggccgtggtcactggagtgtttactctgcttacagggtctggtgtagtgggggatggctgggtaggaacgtgcgggctataaagccagaccccaggtgtcagtgcggttcagaaagcaactagcacagccatgcccaggccaggacccgtgacacagcgatgctctcagatgctgctgatgttacagatgttgttgggggcaccctgagggggcaccctgactctgcaggtgagaaccttctggggttcctaggaccctcggacaagcactctgatccggatgactccaggtcccaggagttgcagaaacgccaccaggaccttcagagcaccagttagacaaggagagccaggaggagctgggccccaacctcatccaaaagcacaggtgagctctgagacctccacccccaggacagcccccaygtctattttctttttctttaaagatgttcttatttgggggccaggcgtggtggctcatgcctgtaatcccagcacttygggaggccgaggcaggcggatcacctgagatcaggagttcgagaccagactggccaacatgacagggtgagaccccatctttacaacaaatacaaaaattacccaggcatggtggcacacgcctgtaatcccagctactagggaggatgaagcaggagaattgcttgaacccgggaggcggagattgtagtgagttgagatcgcacaactgcactccagcctgggcaacagagcgagactccaatccaaaaaaaagaaaaaaatcccctaggacagggctgtggctgagaccctgagggctggaggcttggctggccttgcacagcagcgggtgcatgctggggtggggagaggcctggagaccctgtgactccactgggggccttgctgtgtgaccccctagtgagtccttgtgtctcttacccacgcatgcctgtcacatgcagacacccacacacacccastatctgccggacagrgcagcccttcctctccgcagccaggaagctggacataggcacaagggctgacgcctggggccaggaatcctgcctgagcattaggagaaggtctggaaccccagggggaagggcactcctggggcatcccctgcccctctaccatctggtggctggactctacaccagcctgccctgctctaaaaccccagctcctcaattctgtgccacctcctctctgggcccagacaagagcagattcatccctgccccaaaggaaccaccagtcttgggtcagcagagctgggcacagacacttccagtgccgtggggctgtaactgtgataggtctgttgctccatgcacttggcaagtcaacagctgagaaaacaggttgcaacatggaaagagttttaatccgaccggcgtggtggctcatgcctgtaatcccagcactttgggaggctgaggcgggtggatcatctgaggccagcagttcaagatcagcctggccaaccaggtgaaacctcatctctactaaaaatacaaaaattagccaggcgtgatggtgcgcacctgtaatcccagctacttgggaggctgaggcaggagaatcaattgaacctgggaggcggaggttgcagtgagccaagatcataccactgcactccagcctgggcaacagagcgagagactgtctcggaagaaaaaaaaaaaaaaaaaggctgggggcagtggctcatgcctgtaatccccacactttagaggcagaggccgacggatgacttgaggtcaagagttcgagacctgcctggccaacatggtgaatcaccgtctctactaaaaacacaaaaattagccaggtgtggtggcgcatgactgtaatcccagctactcagtaggctgaggcaggaggcggaggttgcagtgagccgagattgtgccactgcactccaacctgggggacagagagaaactccgtctcaaaaaaaaaaaaaaaaagagatttaatcctagggccacccaatgaggagataggagggaacctcaaatccatttccaggaggaggagtttggggccatataaatgtatatatacaaatatatatatattttttaagatggagtcagccggccgtggtggctcacgcctctaatcccaatactttgggaggccgaggccggcggatcacaaggtcaggagattgagaccatcctagctaacacggtgaaaccccatctctactaaaaatacaaaaaaaaattagccaggcgtggtggggggtgctcatagtcccagctactcaggaggctgaggcaggagaatagcatgaacctgggagctggagcttgcaggttggagtgcaatggcatgatctcagctcactgcacctccgcctcctgggttcaagcgattctcctgcctcaggctcccgagcagctgggattacaggcatgtgccaccacgaccggttaatttctgaaattttttagtagagacagggtttcatcatgttggtcaggctggtctcgaactcctgacctcaggtgatccgcccgccttggcctcccaaagtgctgggattacaggcrtgagccactgcacctggccaggggctagagttttaatttttaaggattttggagtgggctgaagtgtggaggtcattgcttggtgaaagagtgcaggaggtgaagtcacagacagtaagaaactgtattctcatgcagattccgttcctctgtggggtcttcacactggtgggtgtcattggttaaggatttcaaaaacatcttaagaaattcttctaaaaagtcttatgattctaaggtcggaaatcacatctatagcaaatggtcggtatcaggtgctacaagcaacttgcggtcacaaggaagtgggtcaaagtgcagcctgattagtgcttaattataactaagtttctgtccagaattctttttttttgagacagagttttgctcttgttgatcaggcggaagtgcaatggtgaaaacttggctcactgcaacctccgccctctgggttcaagcgattctcttgcttcagcctctcgagtagctgggattacaggcatgtaatcccaccaccaagcccagctaattttgtatatttagtagagacagggtttctccatgttggtcagrctagtctagaactcttgacgtcagatgatccacgtgcctcggcctcccaaagtgctgggattacaggcgagagccaccgtgcccggcgcagaattcttttttttagagaygaggtattgccatcttgcccagacttgtctcgaactcctgggctcaaacaatccacccacctcggcctcccaaagtgctgagattactgacataagccaccatgcctggcccccagaattatgaatcctgtgaggatggcttcaaggtgagcgctgagccagacaaaaggatggggtttgggagcaccctgcttagactggaaagataatgttggagaagacttcctggaagaggggctttttgcgtagagttttgaagaatgagtaggagttctccagaggaggatgagtaactgcaataacacccagtttatcaagtgcctcctatgtgtctggccctgtgctttacccctcatttgaccacctctccagtgagagtctcagtccyttttttcctggtgaggaaacaggcatggcagagaggcatgacacatcaaggttgcccttcctggctccatctagccygttctcctctgcttcctttgtttttcaccatctttagcctttgaccccaaccaaaaagagaagagaggaaatcccatgggcatagacagccacctcttaaactcttgtctggaatttttcacatagtaacaatgtctttttttcctccaaaaagactcccaggctggaatggtgtcctcatatcgaggaagaggatactgaggcycagaaatgtgccctagctttactaggagcgcccccacctaaagatcctccccctaaatacacccccagaccccgcccagctgtggtcattggagtgtttactctgcaggcagggggaggagggcgggactgagcaggcggagacggacaaagtccggggactataaaggccggtccggcagcatctggtcagtcccagctcagagccgcaacctgcacagccatgcccgggcaagaactcaggacgstgaatggctctcagatgctcctggtgttgctggtgctctcgtggctgccgcatgggggcgccctgtctctggccgaggcgagccgcgcaagtttcccgggaccctcagagttrcacwccgaagactccagattccgagagttgcggaaacgctacgaggacctgctaaccaggctgcgggccaaccagagctgggaagattcgaacaccgacctcgtcccggcccctgcagtccggatactcacgccagaaggtaagtgaaatcttagagatcccctcccaccccccaagcagcccccatatctaatcagggattcctcatcttgaaaagcccagacctacctttgagcctcagttgccccatctgtgccctgggtaggaatatcctggatccccttgggtctgatggggtagccgatgcctgatttgcacccacaacgtgggaggttataacctgtccccaagttgcaaatggggaaactgaggtacagggatgccagggaccctcctgaatgtgcacagcacctgggaaacccggggacggggtcgggcgtgcggtgtgggcatggtccctgacctgggctggggccaggatccaagagaaacaatgggggtgtggtgcatggatagaagtttgtgatgggcagagccagctggagctggttctgaatctgatgaaatcgcttgtcaaggcactgctaaagtcacatgcaacgagcgacttgttaggggaggaggagagtattttccccatctctgtgccctccatggaggctccaggggtgcagggcactggatgaggtctgggctgtggtgggacccaggagggggcaggcagaggggcacactcttagcccgccctaaacccatctgtgccgtrtgactccggcaaacctctcacccttgctaagcctagcaactaggttaaggcaccctcaaaccccagtctccccagtctccctaacacttgtaccagcctgaggggctgtgattcctagaggctcagtagtctggaatgtgatgggtttggcactcttcatttctcgggattacacctgtaatcccagcactttaggaggccaaggtgggagcatcgctttaggccagaacattgcagcctgggcagtatagcgagaatccatctctaccaaaaatgtttaaaaaaaattagccagacatgatggtgtgtgcctgtagtctcagttattcaggaggctgaggcrggaggagcacttgaatccaggagattgaggctgcactgagccatgagtgccccactgcactccagcctgggtaacagcaagaccataataaataaataaataagtgaagcaagtaagtttttgactgccagaagaaaagcagagccatggttggaatctcaggctgcctgaatatcagatatacattaattccttcaagtatttactaagcacctattgtgtgccaggcacagtgtcaaccaagctaagattctaagtagggaatatgaatgatacacaaggaaataaaatagggtgcttcctattttaggcaggctggaaggaagaggaggagccagccatactgagattcaggagattcaaggggagaaatgcccttttttttttttttttttttttttttgagagggagtcttcctctgttgcccaggctggagtgcagtggcacgatcttggctcactgcaacctccaccgccccgattcaagccattcttctgcctcagcctcccgagtagctgggatcacaggcgccagccaccatgcccagctaatttttggtakttttagtagaagcgggcgtttcaccatattggccacatatcggccaggctggtcttgaactcctgacctcaagtgatccacctgcatcggcctcccaaagtgctgggattacaggcgtgagccaccgcgcccgcacggagaaatgctcttggtaggggaaataacttgtgcaaaggcgccgccgccgtggtgagatccagcttggcgtgttaggggaaatgggcaccctcgttcctggaaaacggtaggcctgtgggtgaccagcttccctatctgtcttcccacagtgcggctgggatccggcggccacctgcacctgcgtatctctcgggccgcccttccygaggggctccccgaggcctcccgccttcaccgggctctgttccggctgtccccgacggcgtcaaggtcgtgggacgtgacacgacckctgcggcgtcagctcagccttgcaagaccccaggcgcccgcgctgcacctgmgactgtcgccgccgccgtcgcagtcggaccaactgctggcagaatcttcgtccgcacggccccagctggagttgcacttgcggccgcaagccgccagggggcgccgcagagcgcgtgcgcgcaacggggacsactgtccgctcgggcccgggcgttgctgccgtctgcacacggtccgcgcgtcgctggaagacctgggctgggccgattgggtgctgtcgccacgggaggtgcaagtgaccatgtgcatcggcgcgtgcccgagccagttcsgggcggcaaacatgcacgcgcagatcaagacgagcctgcaccgcctgaagcccgacacggtgccagcgccctgctgcgtgcccgccagctacaatcccatggtgctcattcaaaagaccgacaccggggtgtcgctccagacctatgatgacttgttagccaaagactgccactgcatatgagcagtcctggtccttccactgtgcacctgcgcggrggasgcgacctcagttgtcctgccctgtggaatgsgctcaaggttcctgagacacccgattcctgcccaaacagctgyatttatataagtctgttatttattattaatttattggggtgaccttcttggggactcgggggctggtctgatggaactgtgtatttatttaaaactctggtgataaaaataaagctgtctgaactgttccctgtggtgtccaggataagggaaggtgaccttgagaagatcctcctctccctgacctcagtttctctaggagacctgggagggggtaagtggaaaggctcaaggaatgagtggcaaggtgttctcggagatgccaagccattggaaggtgcttacgacacctgtgggctctaagggcagccttggccattcctgactccctgactctctgtctctatttctctatctccttattgctgtttcttttttctttttattttttttagacggggtctcactctgttgcccaggccgaagtgcagtggcacaatcacagctcactgcagcctcaaccacccgggctcaatcgatcctcccacctcagccacctgagtagctgggactacaagtgcatgccatcatgcccaactaacttttgtattttttgtagaggctgagtttcgccatgttgcccaggctggtgtttctgttttggaaacagctgagaccccatacctttttaagtctcagcttccctccatctttcctcattcctcaaaacttctctctttggggtctgaggcagaggatctgtctctgtctttgtctctatcaccatcctgttgctctccccacttgggagtcacctttccaaacacaggcagctcagagccaagtctatctgcaaccaagtgccttgttttgtggtactgtccccaacctgaggggttagtcccatcacccctcctgtttgtggcacttccatgttagtgacacctcattctttcacatataaagagtagggagaaacaaataagttgtgaagaatattttcatgcacaccacatctcccaggttatatatacttcctgtttaggatgttggaattttgaggtgtgctgagtccagccccctctccacaccaaactgcctgcccatcctgaatctctgagaggaatggcgatgggtgtcttgagggacagagtacccacttccagcagtgaggtgtatctgctgggaatgccatcacccacaggccaacctgaatgactgcaggttccccttaacgtattcagtgagtgcccactttatgccaggccccggacacagctgtaaaaagacacacaaggaccaccccmctttgcggagcctggttgagtgaaggggacaaatgagtaaatcctaagaaagtagttgattgcagtaagatttgtgctggggattcaacccatcagttcattagtgaacggaggcagaggtgatctagatagttggatggggaggcctccctggggagggaggtcacatttgagctgagacctggaggaagaaaaggagtcggggagggggtagttgagggtggacattgcaagtaaatgcaaacagcaagtgcaaaggccctgagatgggagcaggctcacttcagtcacagcaaagctgttgaaaatgggcacctaggaggcttcaaaattaaactcaataccaaaaggcagcagatggtgtcactgagtctttccccaaacaacagctgttgcctttgcaaggtatagggctgggcctgtgccttctctgtgcttctccaggctcttgcacaagttggtccacccagccagcatgccctttcctctccaattctcaaactcctatgcatccttcaaaacccactgcagattcccctcttacatgcagccttattcaaactcattcaattgtctccatgtggggactgtgctcccattcttccctttggcccaggcttgatctcccaggactgagggtacttgtctctagttctatctcccccaggttggaggattgggctgggaccagctgataggaaacccagttgaggcatgagcctgaaaaaactcttgaaatacagacatctgtgagtcattaactctgcctgagaagaaaccagggacagcttctcaaaggaggtggcattgcaccagggtcttgaaagattttctcagaatattagagctaaaggaatatatacatttttttattttgggggtggtgtgggctgctctggaggccaagcctggagatcagggacctgggaaggggccctgagaggggcagaagggaggaatgtgcctgggcgcagtggccacgcctgtaatcccagcacttcaggaggccgaggcgggcagatcgcttgaggtcaggagttcgagaccagcctggccaacatggcgaaaccccatctctattataaatacaaaaattagctcggcatggtggcgggtgctgtaatcccagctactcaggaggctgaggcaggagaatcacttgaacccaggaggcggaggttgcagtgagctgagaccgcagcattgcactccagcctgggtgacagagtgacactcagtttcaaaaacaaacaaacaaacaacaacaacaaaaaaaaacagggatgggaggtggggagcaatttgggagtctcagatggagacttggtcttagaactcagaaatccccaccttgaggaacccacgcaccctgagccagcagcctcatcagcctcgaagcatttattgagcactgcctgtacatccacaggagggtgatgacaggattggcacagtgaccgtcctgtccccttgttgggggtctctcctcttccccctctaggagctgagggagctgaggagcggcatgagggacagggagggggcggcagagcttcctggggcctcaaggacaatcctttcctgtmcccattcttcagatggggaaactgaggccatggaggagttaggacgccctgagtcacccagcagggactgaaggggttctgggtggaggttaggacatcttaggctcagtgcccggggatcacgtactcctcttcatccattggggcctggcccagtgactgcaggttacagtagacaggctgggaagccaggtcgatgtccttgtagttgatgtaaaagtcattgtcctctgaagggtgagccctggggggacagacagaccaggggtaagtgtgggagggggaggactcaggggacaggcacatgagctttgagaaagtccagagtgggccaggtgctctgactcacgcctgtaatccagcactttgggaggctgaggtgggtggatcacctgagatcatgagttcaagaccagcctggacaacatgatgaaacctcgtctctactaaaaatacaaaaattatccaggcatggtggcacaggcctgtagtcccagctactcgggagtctgaggcaggagaatcacttgaacccaggaggtagaggttgtagtgagccgagatcgtgccattgcacttcagcctgggagacagagcaagactctatctcagaaggaaaaaaaaaaagaaagcttcagagtggctcagtccaccccgaatatttacatatggggaaactggcacgggctagcgttctgactcctagccaaccccacctctctctgaggaggctgcgggagggcagtgatttagggaaggttctgtgggtgtaacgctgcggtctgaggaccctgaaccctttttccttccttaaaaatgagatagcggccaggcgcggtgactcatgcctgtaatcccagcactttgggaggccaaggcagaaggtctgcttgaggccaggagtttgagaccatcctgagcaacagggtgagaccccatctctacaaaaaattaaaaaattattcaggcgtggtgacgtgtgcctggagtcccatctcctcgggaggctgaggtgggaggaccgcttgagcccaggaggtcgagcctacagtgagccgttatcacaccactgcactgcagcctggatgacagagggagaccccgtctcaaaaaaaacagaaattgaggtagctgttcattattacattaaaatctaaatttttgtttcctcttgaaaaatcggaagctctggccacgtcagtcacatgcacacaagtggctgcacccacactctgtgctccttccgatgggaaatgttttcaccactgaagcaactgactttgtggccctcatatataaaagcaagtctctgagcctcagtttctgcatctatagaattggtcaaggagcaggtagctacttaggaatatttgttatggtcagcaagacctccagagaattttcctgcctcctgaacattctaattccaacccagctcctcttgtaaaaagggccactgggccaggtgcggtggctcacgcctataatcccagcactttgagaggccaaggtgggcagatcacctgaggtcaggagttcaagaccagcctggccaacatggcaaaaccccgtctctactaaaattagccgggtgtgatggtgggcgcctgtaatcccagctactcgggaggctgaggcaggaggcaggagaatcacttgaacccgggaggtgaaggttgcagtgagccgagatcatgccattgcactctagcctgggcgacagagcgggaaaaaaaaaaaggcaaaagggctactttgtgttaacagcatctatcagtcaattatactctagtacgaattgcccaccaacccctaagtggttgtagggggacgaacaggtctgggacgcagggtttgtgtcctgccttttttgactggctatgtgaccttggacaagtcatttccctgcctcccagagcctccatgtctgtaactgtaagatgcagggtggaaatgacacagtcaattctaaacacagtgtttctggaggccagtacataaaggaggctgatccggaagcctcggggacagggaggccaagatgaacatcagagcacaagctgcttttgcgagtccagtgtcttcaacaccctgcctcagaccatttctgcttttgagccatgttgacatctgctttgcatattttctcctttctcaccaacagccttccgatagcctccccacctcctggcacggactctgctgcccaaacacagccatggccgcggccccttcctgcttggccctccctgttcccctcaggcctcagctttcaagtcatcccttctcaaaaaccattcacagcaaattctctgttctttcccacctctgggtctctgcccctgagggtcccaccccttgaaattccctccattcccttttccaacctagaaaagcttttcttttctttttttctttctttctttctttttttttttttttgagacggagtctcgctctgtcgcccaggctggggtgcagtggtgcgatctgggctcactgcaacctccacctcctgggttcaagtgattcttcttgcctcagcctcccaagtagctgggattacaggcacccacgaccatgcccggctaatttttgtatttttagtagagacagggtttcaccatattggccaggctggtctcgaactcctgacctcgtgatcctcctgccttggcctcccaaagtgttgggattacaggcatgagccaccgtgcccggcctaatttttgtattttttagtagaaacagggttccaccatgttggtcaggctggtcttgaggtcctgaccacaggtgatctgacctcgccttggcctcgaaaagtgctgggattataggcatgagccaccgcaccccacaccaacctagaaaagttcaactcatttgtctaagcccagcaaaatcatccagaagccggtggcggtggctcacacccataatgccagcactttgggaggctaagacatgaggatcacttgaggccaagagtttgagaccagcctgagaaatatagcaagacccccgtctctatgaaaaatacaaaaattagttgggtgcggcggcatgtgcctgtggtcccaactactctggagactgaggcaggaggatcacttgaggccaggagcttgaggctgcagtgatctgtgatggtgccactgcactccagccagggcgacagaatgacactgtctcaaaaaaaaatgtcggctgggcgcggtggctcacacctgtaatcccagcacttaaggaggctgaggtgggcggatcacgaggtcaggagatcgagaccatcc

SEQ ID NO: 8799 - DNA, 33042 bp, Homo sapiens
tggtactgtcttcatgatagtgaatgagttctcacaagatctggctgtttaaaagtgactgtcacctccccacatccctctcttgctcctgcttttgctatgtgatatgcctgctcccctttcaccttctgccatgattgtaagcttcctgaggccttaccagaagctgagcagatatcggcaccatgcttcctgtaaagcttgcagaagtgtaagccaattaaacatcttttctttataaattaccaagtctcaggtaattctttataacaatgcaagaatggcctaacaaaatgtctatctagttccaaaatatttttatcagaagaaaactctgtaccctataagcagttagtccccatttcttcctcagcccctgggaacctctaatctactttctgtctctatggatttacctcttctatatgtttcatataaatggaatcagacaacatgtaaccttttgtatctggcttcttttggaacaggaattaaaagaaattaaataatgtgtaagcggaaactcagttgtatgtaacaaaacccaactccccctgagaaagagaaagagctggagccctttaaaaattaactgcctgtttttctgtggctagtgagacttacctctcctcctttcccaggcattgtgaagaccctgtttctctagctgtgcagctgcaaggtcactagacagataaactcaagtcgcaaaacatgtttcttcttgaaaagtaagaaatgatgtaatgcatgtctcaattaattgaataactgtctttatttctcacttctgtagtatgcttccccctgcacagatacccctctctcccaccccacaaaatgcttaaaaggtaacttaactctttgttcagggctcagtcctttggatgttaatctgacttggccagtgcacctaaataataaatatcctcctgaaccccatcggtctctctgatttcttaaaaaatcccgcaatatttccactaccaaaatttgttgacacattggatatgacttgtgaaaaaaaagagaggtgtctcagttaactccaaaagttttggtctgagtaactggaaggatggagttataatccactgagatggaaaggctgtgggaagagccctacagattggaggagaaattcagaagttcagtttgggatatgtaaaatatgagaggcttattgaacaactaaatttgtttggggatggagatgttgagtaggcatttggctacaggagaatggttctggttgtacagaatttagaattcgttcgcatttaaatggtattcaaagtcaagagtgtgaattggaccaccaagttagtgaggttagacacagaagagcaaagcggtgatctctggagtactccaagggtttggaggttggggagatgagggagaatcaacacatgatacagaagaaatagccagtgaagtaggaggaaaaccaggagctccctggtgaagtaagatgaggatggagaataggctgtttgtgttagtgaagtgtaggaccttggtgagagcagtctcagggaattggtgtggctgaaagcctgattggacaagcttcaagacagaattacagcctgagcaacatagtgagatcctgtctctacaaaaataaaaaataaaaaaattagtcgagggttggggcatgtgcctgtagtcttagctacatgggaggctgagggagaaggggcactagaccctaggattccttgagtgcaatgagctatgatcgcaccactgcactctagcctgagtgacagagcagcattcccatctcttagagaaagagagagagagattgagagaattagaggagaggacttagaaaaaagtaagtctagatacttctttcagggtatagtgggagcactggcactttcacaagtctccctggctccacgtttttccccattttaccatgtcttccaagttcctgccataagttcagcttaatgatcaagagcatggatttggaactgattggcctctgttcaaattcccaaccatgtctcttactagttatgtgactaaggcaactttctttttttaaactttttttaaattatactttaatttctgggatacatgagcagaacgtgcaggtttgttacataggtatacatgtgccatggtggtttgctgcattcatcaacctgtcatctacattaggtatttctcctaatgctgttcctcccctagccccacatcccctgacatgccccagtgtgtgatgttcccctccctgtgtccatgtgttctcattgttcaactcccacttatgagtgagaatgggtaatgtttggttttctgttccagtgttagtttgctgagaatgacggtttccagcttcatccatgtccctgcaaaggacatgaactcatccttttttatggctgtatagtattccatgatgtatatgtgccacatcatctttatccagtttatcattggtgggcatttgggttggttccaactctttgctgttgtgaatagtgcctcaataaacataagtgtgcatgtgtctttatcgtagaatgatttataatcctttgggtatatacccagtaatgggattgctgggtcaaatggtttttctagttatagatccttgagaaatcgccacattgtcttccacaatgattgaactaatttacacttccaccaacactgtaaaaagcattcttatttctccacatcctctccagcatctgttgtttcctgactttttaataatcgccattctaactggcatgagatggcatctcattgtggttttgatttgcatttctctaatgaccagtgatgatgagctttttttcatatgtttgttgactgcataaacttcttcttttgagaagcatctgttcatatccttcactcactttttgatggtgttgtttgttttttcttgtaaatttgtttaagtttcttgtagattttggatattagccctttgtcaggtgaatagattgcaaaaattttctcccattctgtaggtttcctgttcactttgatgatagtttttttttttctactgtgcagaagctctttagtttaattagatcccatttgtcaattttggcttttgttgctgttgcttttggtgttttagtcatgaagtctttgcccatacctacgtcctgaatggtattgcctaggttttctcctagaatttttatggttttaggtcttccatttaagtctttaatccatcttgagttaatttttatataaggtgtaaggaagggatccagtttcagttttctgcatatggctagccagttttcccaacatcatttattaaatggggaatcctttcccaattgcttctttttgtcagctttgtcaaagatcagatggttgtagatgtgtggtgttatttctgatgcctctgttctgttccgttggtccatatatctgtttttgtaccagcaccatgctgttttggttactatagccttgtagtatagtttgaagtcaggtagcatgatgcctccagctttgttctttttgcttaggattgtcttggctatacaagctcttttttggttccatatgaaatttaaagtagtttttttctaattctgtgaaaaaagtcagtagtagcttgatggggatagcactgaatctataaattaccttgggcagtatggtcattttcatgatattgattcttcctacccatgagcatggaatgtttttccattcatttgtgtcctctcttatttccttgagcagtggtttgtagttctccttgaataggtccttcacattccttgtaagttggattcctaggtattttattctctttgtagcaatcgtgaatgggagttcactcatgatttggctctctgtttgtctattattgctgtataggaattcttgtgattttttcacattgattttgtaacctgagactttgctgaagttgctgatcagtttaaggagattttgggctgagacaatgggattttctaaatatacaatcatgtcatctgcaaacagacacaatttgacttcctctcttctatttgaatacactttatttctttctcttgcctgattgccctggccagaacttccaatactatgttgaacaggagtggtgagagaggcatacttgtcttgtgccagtttttaaagggaacgctttcagtttttgcccattcagtatgctattggctgtgggtttgtcataaatagctcttattattttgagatacgttccatcaatacctagtttattgagagtttttagcatgaaggggtgttgaattttatccaaggccttttctgcatctattgagataatcacgtggtttttgtgattggttctgtttacgtaatggattctgtttattgatttgtgtatgttgaaccagccttgcattccagggatgaagccaacttgattgtggttgataagctttttgatgtgctgctggattcagtttgccgtattttattgagtattttcgcaatgatgttcatcagggatattggcctgaaattttctttttttgttgtgtctctgccaggttttagtatcaggatgatgctggcctcataaaatgagtgagggaggagttcctctttttctattctctggaatagtttcagaaggaatggtaccagcacctctttgtacctctggtagaatttggctgtgaatccatctggtcctgggctttttttagttggtaggctattaattgctgccttaatttcagaacttgttattagtctattcagggatttgacttcttcctggtttagtcttgggagggtgtatgtgtccaggaatttatccatttcttctagattttctagtttatttgtgtaaagatgtttatagtaatctctgatggtagtttgtatttctacgggatcagtggtaatatcccctttaccattttttattgtgtctattgattcttctttcttattagtctagctagtggtccatctattttgttaatcttttcaaaatgcagctcctggatttattgattttttgaaggctttttcgtgtctctacctcctatggttctgctctgatcttagttatttcttgtctttcgctagtttttgaatttgtttcttaacctctttgagactctttagaatggggataataatcatatctatagcagagagctgttataaagattaaacaatataataaatatggggcgctgagcttcagagtttttgttgttgttattattattttcctaaaaatgcaaatctgatttgcatttgactcattgactcacatcagtgggtcttcctttttattgtccttcatcatatgggtcctaatttcacatgcagtcttataaaaccatctcattttatagtccaagaatattaaaggtacttgtaggctcccaaacctacacggtgaaaagctagagagcatgggctctcttcaggggttaacttcaggaagtgccactaacaaggacgtccactaggtggtgagcaaggaaagacggaggtgaaggaaccgaaacgagtcaagtccactgcttagctctactgaagttttgcaaacatcataaatatgtctgaaatgcagttttgatttgtagtatttgcaatttccaagggccatttaccacaggtagccaagagttagtttagcatttatgaaaaagataggggagggtggtggaaaagaaggaggaggaggagagagagaaggaggaagaggagaacaagaaccaaacaaaaacaagaacaagaacaagtagaagaagaggagcaggaggaaaaagaagaggaagaagaacagcaacaacaatgagtgaaggaggaggagggtaaggaaagatgcataggagaatggaaggaaggatagaaaggagggaaggaagagagaatctagtcacattactttctgatcagcagttcatttttgtctcagtgggaggcaatagaggccagtctaggaaaggggtggggaaagaggaaagagaagtgcaggaggaaggggagggaaaaggggaggaggaggaggatgtgagactgggttagagaaatgaaagaaagcaaggctttctgttgacattcagtgcagtctacctgcagcacagcacactccctttgggcaaggacctgagacccttgtgctaagtcaagaggctcaatgggctgcagaagaactagagaaggaccaagcaaagccatggtgagcctttcagcctaaaagacgtttagatgctcagatagaaactcttggggttgtagaggcaggtggcaaggataggaatcaccccatttcaattctggttttaaataatatagaaactaaacattttctcagaccctcaaaaaaagtgatcctgaaatctttcttctcagatatgctgatttcctcttcttgactttgtctctggggagactcttgaagaaatactattgaaatcagatcttttgcaataaacactgtgtctacctgagaagtgatatgctttggaagatagaatttttttaaaattatactttaagttctagggtacatgtgcacaacatacaggtttgtcacacatgtatacatgtgccatgttggtgtgctgcacccattmactcgtcatttacattaagtatattttaaggtgtgcaggaaatttgtgactttgtcatttcagttgctcaaaaaggtatttctttttattaaaaaaagaaatacttttctttcctggtgtctggctatctaattttttttttttttaggtatttgaggcattgacycattatgatcaagagtgaggctataacattaaatataagcatcaatagttaattaagcagcaacaatactttaaaaaatatacatagtaaatattaaatagttttatctaatagctcagcagaaaagcaggtataaaaattaccaaaccatagaaaaaattcagggcagtaccgattagcaacttgagactaaagcgtaaaaataaaatagaacaaaacaaaactgtgcatcagttctgatgtaaatttgaagtaatttttcatctatgtctgagaaacctgttacctcagacagggttagyagacatatgtgttttattctgattattaagaaagttgtaagcaccacctcaaaggctataaatgtgtggtttaagagtatacatctaaatataattttgtatttcatttgcagatatttccatggaaatgtcagagcacccagagggacttatggaacatcttcaagttgtgggggtggacaatgctctgttgtggtatgttatgatatttatatatcgctaagtctattttacttatattcatttttcttaaatatccactagttatacatagtctaagggaaaattatttcacagagctgttaattctatcccttctgtaaacatctcttttcttcttacctttagttcttccccagaaactcctgaacactatttttaacctataatagcccatgctgtagagttcaaatcccaataaccccacaaaatccctcaattataaaggaataatgttaattaagaaatctctgttaaggtacttacaatctgtaccaaatatttagcacctcattttctattttttattcatagttcagtgtacattaatgtcatttctacaattacaatacgagcttattaagggacggggstttatcattttttggtccttctcccattgttgtgacaaattttatatctgattcttgaagactctccagcaatagctttgaacttggtttttcatttcctaagtaaactaatgtcttctttctccctagcctggattttcagctctagccaagcaaacatgctaactctcccgttcacacattccttatgccatgtctgcactgtgtcacatagaaacttagtgctcttttcatacaacaggtattttctgagtccctacaatgtgtgaaatttatgctaggcactaaggatacagcagtggacacaacagttttttccctcttagaacttgcattctagtggaatgctcattcaaaactctgttcaaaatgtttattttatgatgctctttaccatcaattatatctgtttctttactgtattaaatagtgattcatgtagatcataccatgcttagaatgccatatattattatgaagtcattgtgtaattatgtgtttaattagatatcttcaaagccctcatatttgatgggtccatatgtttattaaacatcatcagttgagtctctttgtgtatagaacatgatctaatgaatttcataatcctataccatttggctttgtaaattgttctttttaaaaattatacagttagatatataagagttgagtggtatattgggcttttccagaagcagttcttcctatggtaaaataaaatgttttttatgtaaaagaggttacttaaaagtatgtcactgttcttcctgtccttattatgcttctcccataggtacatatgtgttggccttcaagaaatgattccaggattaaaaagtatacgtaaattgtatagttatatgatattacackgtaattagttgtaaatcattaacagctacaaagaaaaagaaatatgaatgtctaaaatatgttggttaaatttcacctgaaataattttgagaaaaaaattaataagaaaataaacctagaaaaccactaaatttgtttcaaatagaaccttagataaaagcatcttatattcaagccagaaggtctaggttctacttcaaatctgcaaacaactattctgtgatcctgagatggtcacatacactcttaggctctgtttcctcatctctaagtgtctrgctcagcctggagtagtgctaggttctttttagctgtaacattatgtaagtctgcataggtcacactgatgtcttgcagatttcctggcacatcatggaaccgactgctggacttaccattattctgaaaaacccatgaactggcaaagggctagaagattctgccgagacaattacacagatttagttgccatacaaaacaaggcggaaattgagtatctggagaagactctgcctttcagtcgttcttactactggataggaatccggaagataggaggaatatggacgtgggtgggaaccaacaaatctctyactgaagaagcagagaactggggagatggygagcccaacaacaagaagaacaaggaggactgcgtggagatctatatcaagagaaacaaagatgcaggcaaatggaacgatgacgcctgccacaaactaaaggcagccctctgttacacaggtagggagtgasaagacggctatgctgcctcagactcaggaagggccacgsttaagagaatactcagatttaccccatggaaaggtggggggatgagaacagcttctggttcattctaaaatacatctagccctctatataatcttgcatcgtgtcactcctaagaatttttggtgtgtaagatttgtccctgtgcacaaaagctatacccctaaatcaagttacatcaaaatgatagatctacgtaggaagtacagaggaagarctagacaatcagtgcctttgataataaggcaggggaggagaagctgacagctggggccagttggaaacttaggctcacatcacctcagttttcacattgtgaagtagagagtgtggtgctgcgtgcttccttcttggtctaaccttatataattttatataaaaattgcactrtctttggtgtatgaatatttctgtaaaatcttctacaattccaaaacagccagcattttccaagtgatgttttaataatgaaccatagttaatttggtctcttataaattggactctacygttttagcaaatttggactttttaatctttgatttctataaagaaagggattgccaagaaataattgcatgcagaaatgattgaggtcaggtcatcatttaaccttctcactcattaaaaacaagtaatttcaagagtttcaaggtatgccactaagyttcctatargtgttacagaatattagtattggtaatttcattccaaaagcaaataaatgcctatgactatatgcttagtgtattttatacgtaaaaattttagcatatgatttttatgctatgaatttacaaataaacctttcctgattatttaaatcatctcagacaaaaggttatctatgtctaaagaaatgactttgagtactaaaatgtaatcacattaaaatattttttttctgacctccttaaagcttcttgccagccctggtcatgcagtggccatggagaatgtgtagaaatcatcaataattacacctgcaactgtgatgtggggtactatgggccccagtgtcagyttggtaagtctctttcctttctttgcttcttcttaggtaaagtcacaggaatcattatagcttatcatgaagctggttggaacaaaatgatactagccactctgagaaatgggaagttttgatcagaaagctctgctttcacaatattgttacctttccgtaaagatttcataagtcagcatgaagtttcgaytcacttctcaacaagtctttttgagtaccacaagaagcacagtgttgggataaaagctgtcagggttacmataaggaattagcatggtagattcccgctctcaagaagctcacgatctaatgagcttgttagattaattagaactctaaggtctggaagaaactatgccatttatcattaggaggctgagttacccagaaagtatcttgctttttccttctagtagttcctttccttcttgcagttctccacacttaacacatgtgctctgtagcacactgactttgctggtggccttctctctcattttgcacatggccaaaaaacatgtcatctttaagacattgttcaaagacagtttcttctaggaagctttcttagttctgatagctccacatatttcttcctcatttctcccacttatgttgaagtcatctgttcacttgtccgtctcctctggtactgaaaacttcttgagatcagtaagtgtcctatttatcattgcatctttgggatccacaaaatgcctgtatatatgaggcacttgcttgtgagcctgaattgaattggacaatttaattttttwaaaaagcaatgtttgtaaacaataaagaattaaaaccaaaatacatttaaatgtcaaccaactgaaatagatctatagatctaactcatttcacttgatccctgggccatgactccttcctaatactttaccctcaccccatttttgaactctattttttaacccttatgttattggtatgcctattttactcatttttaattattggtatgcctatttcactcatttttaacattttacttttctttgtcttggtttctctcatatcactcttttctcattctttctacctgtgatcatttctcctgagatccttcatgagcacttatccaggaccataaactactataatttctcagcttttgtcttttgtatattgctcttctgactctaatctacatgtatcctttggtcaaacttactgacttttgcggactcacaaatctatgtgatctttggactgataagcctatctccagctctgaactcaaatatgctaaggatgtcctttgggatgtttaaaagactataaaaccaattgttcccagtcagcttttctcttcgtatttcttatctcagtatgtggaatcaccatttacatgggcaccctggtatgagactctcttaactcccccaacatttatgcagggtaacattctaccaatttttacaacttagtgtttttctaatttgtcttccacttgtcaactctactaccattgccgtcattatctttcttctagattcttgcaatagtttattagatgagttccacaattttaaattagctcccctcaaatacattattcatactacagggagactgatcaattaaaagcaattaaaacacatcacacatacatgacaatccacccattaatttctacctaccattttgtcctacagggtgaaatctaagctcttcaagccccagagtaatgcttgatatataatagatactctttaaatcaatgaaaaaagataacattttctcttagttcccatgtytctccctaatctcatctcatatagtttccaaatacaaaaattcttctgattccttgagtccattcttccttgaagtctctagagcaaggtagcaataatggcttaaatytgacagatgaggaataagacatgaaagttgtactgtttactaaatggcatggcagggtctaaaatgtgaaaactttgatttccaagtcttaaatttacctattgtaccaccaatcagaacagggaaatagatacagtttctggagagggttgtcaaaatcaaaagagttaaaattctggaactgagctagaatagaagacagaattgaggtcaaaatgcttcctagacttttatattctctccttgcaaagaaggcttattatggagacccactctttctctgaacatcttgctcccaatactctagtagactcaggggctctgatgtgatagttatttcccgactaagctggtcattcccagttacacctatttggctttaaggattctcactacagataatgctgaagataataatatgaagactagctaatgtttacttagaatttctgatgagtcaggctttgttctaasgtccttgacttatgctaattgaattacatttagtttccatatcaatttgataaagataacacaatttcattattcctcttatatagatgaagaaactgaagttggagggttcaagtaaccttgtttaaaggcacatggttatcaagtggcagggctaggattcaaatccaggcgtcagttcctcttaactcttccccatactgtttctttccctattgaagtgattcagtgtgagcctttggaggccccagagctgggtaccatggactgtactcacyctttgggaaacttcagcttcagctcacagtgtgccttcagctgctctgaaggaacaaacttaactgggattgaagaaaccacctgtggaccatttggaaactggtcatctccagaaccaacctgtcaaggtgagtaacttcagactagaggttttgtcatgcaatcctgggcttacagtcagaacattcagtagaagtttgctgagaagtcaaacttaggagcctaatttaacctaactttgtttaacctactgtgatgtttctcaaaggacttattctaactaaatttttttgaaaaacctcccaaacaaaaagtaaaaaccaaatacccctgaagccatctcccagtgtgtaacatgacttatagcaatacagcatggttatactgtgttttttatttttctcattgccattgcataaataatgtcttgttgaacctcagttacattttggttcttctcctctcaataacacctgttttatgtggtgtcctacttaataccaaccagtttccttcccagggtagtggaggtctttcttggttgttttatttggcttattcttaaaatcacttttacttttcctcatgcataaacttttaggagaataacaactgaaaaacaaaaacacaatctcttgatcttttcaagtttgaaataaggtaggtttttttttttttttcatttttaactgccaaccttatctccatatgggagaaaaccaatgtcatctgaacttacgaagttttggttaacttttctacaagtatgctcctgatgcattagtttaagtagtttaattcttagaagtgctatcaaaatcccttattgaaattataaaactgtcaacccacctactggaatttacggaagttggacttgcttcagtgaattgggatgtttttcaaaatgcttgggtagatatcagaacagatgaaacggcagagattctctgagaatatcccataagagcccttgatgcagaggccatatggcatggtacttccagcagaaggggagggtcaccttagctagggcagcagcctggagtagctactcctctccccacagctttcaatgcttccttgccttcatctctcattcaccacccaccatcattctcaagaaaataaagcctggaagcaatatcacaagtaatgtagtcaggcagctttggctaaaaatcctttgctcaagggagggtctctactcagaaatactgttttgtcttttttttttttttctttttcattgaagtgattcagtgtgagcctctatcagcaccagatttggggatcatgaactgtagccatcccctggccagcttcagctttacctctgcatgtaccttcatctgctcagaaggaactgagttaattgggaagaagaaaaccatttgtgaatcatctggaatctggtcaaatcctagtccaatatgtcaaagtgagtaagtttgtcctggaaaactgaaatcttaacgatggagctgatggatgagcagatatgaggaaagacatacataaacatttacatgttgttttgctaagaatatgtggcctagaaataaatttgtatgcttaactcactgtaaaatctttggctggtctttcctcctcctttaatgacaatcatttcctttttttgttctcacctcttgccatcttaactcctaaaatctgaactcactgatttactttttacccattcttctattccactacaatctaacatctctgttagcccattgaaatgcctgtaaaaggtcactaatgaccacctacttccccaaataatggatactcctgaatcatcactaagctaatgcctccaaaatctatctgtatatgagaagaatcatgtcttgttcatctttgtataccctccacctgacacagtgcctggcaataggtgctaaagcaaatgcatgttaagctagcatgtgaaagaatagctacctgtgtctgctcctgagactatctgcatggatgacaaaagtctttaaatggtaggatctacagaagctgtcagaaatgctgatctctgtgtgctgcgtgcccagggccagggagtagagtggatgagcagagagaggcagggaggcctttagcagaggactgtgtattaggcctatcagagacatttccctttaaggcctagctagtgttcatttcctcctcatcttcatcaagccaacaggtaccttctgtctggagctcctgggaacttgagccttctctcaatcatatatttgggtgtggggatcaaatcaccttgaaaaggttcatcaaagtaatgggaagaactaaggatagaatcagaccctctgccaatatgtaaaaaagtagattccttcaaatgttagtatcaggagacagatttttttttataccagtattttcaaatagaggctcccaaatgaacttagtttacacttacaagagtatctctaaacatgcccttttacttattcgtgaaggaagtagagggaagtggtaactactgcattggaaagaaattagtgcaggtccttggcatgtaaaaatcaagtgcttatttttgcacaactgctttaaagtaaaagcattaatgatttcctttgactggtgaattatccagttcagatcattggcttttatttttcctgaagttgtattaggcttttagctcttctctgtgtttcagagttccagwcattgaacaagtccatggagctaaatacaaygatgaccattcttgccaacatttttaggkgcattttcaggaactctatgaaccacaaatctgggcattgagattctgtaggcattagactagcaaggctggtccagtctttgcctatgctgtagactcatcaggggccttcccatgccagtttcctcatctgtcaaatggcatcaaatgggctactactgggagatgtaaggaggaaaaaagtcaaatatcatgagatagactaaggaaataatgctggtggtctcatgctatgtgccttactgatttctctttcagaattggacaaaagtttctcaatgattaaggagggtgattataaccccctcttcattccagtggcagtcatggttactgcattctctgggttggcatttatcatttggctggcaaggagattaaaaaaaggtatgtgagtttaacttcacatgaaaagaacacaactttaaagtgaaaaagaaaaaaaaaagaaacccacaggaaattaaatgtgatagattcaacacaagcaggatgccaagctttacattctagagccatcagtccctggagacatgtaaatcagcccaggacacaccttcattaaaacaggttggctgattttcgcttttcatctgataaacttttaaaaatgtctattaccttcaaggcarcttgctaggctgataacaactaagtgagatattctaatggttctttgctcttatgtaattctttaatacttttttttttttgagacagagcctcactctgtcaccaggctagagtgcagtggtgcaatttcagctcactgcaacctccgccttctgggttcaagctattctcccacctcakcctcccaagtagctgggactacaggagcgtgccaccatgcccagctaattttttgtatttttagtagacacggggtttcactgtgttagccagagtggtctcgatctcctgacctcgtgatctgcctgccttggcctcccaaagggcttggattacaggtgtgagccaccacgcctggcctgctcttaattaattctgaaaaaatgacacactatctctgtcctctaagagcctacatgccttggatttcaatgctacaattccactaggaagtgggtctaatgtccactaaggtttcaaggcactgctcccaaatacctgacctcttcaagagtcacctggttcccaacacatgggcattgcattaaccctgggagaaattcccatgtattctcccaagtatctattcaccaaggccacagctctaaccaaatgcaccatatatgctttccaaccatccgtcactggagaggaaaagagaaggaggactgccttgagaagttaacatctgctgcccagattatcactccctttaccttaagrcatgagtgtgtctcagctttaaagtgtgagcaacccactagcctgcagcaggccttgggtgtatggtgccacatttggccaaactcacctggaagaaccattcaaggctgtaacattcatggacattgggcagcttttaagatatacctgttttggccaggtgtggtggctcaygcctrtaatcccagcactttgggaggccgaggcgggcggatcatgagctcagcagttcaagaccagcctggccaacatggtgaaaccctgtctctactaaaaatacaaaaattagccaggyrtggtgryrggcacctgtaktcccagctactcgggaggctgagacagaagaatcacttgaacccgggaggcggaggttgcagtgagcygagaccgcaccattgcactccagcctggtgacagagygagamtctgtctcaaaaaaaaaaaaaaaaaagatatacctgtttcaagttcagggatgatctcgaaacaattgctaaccaactgctctgtgttgcctttctgtgggctcagttgattgtcattttaattttccttccatcaaattagttagtacgtattctgttcactgaatatggtatgtaaaggttgccccctgtccatttacactggcaattacaaaaatattatttatcagtccctaattgcgtgccactctgatcttatctttcatttaaatttgagaatagtgggygctargtaagttttctaaccaatccagaaagacaaagtgtgtgaggggggtggggattgttgatatgcaagaacttcattagctatgtataacctgagagcactgagcagttaaaatgtctctgcccttgctattagaaattctgtgctgattgaatctcactatcttatagtattatacagtactaagtactatacagtactaagtataagtatcaagtactgcattaaggcaaaagaagaatgacagttttctccaaccactgattattctttccattgagacttcaaatcttgaccccggttgtcctgtctttcttcctaccttgggcgatgatggcagaactgacggatagagaacagggtgggttattacacactgccccctgggataaggtggctattgtctaaataattttaaggactttggggctgtaagtcaccttaataaggaagctatttatttccgaattctaaaatcttttaataagtgtttgtagaatcaaaagaatagaatcaaactcatttgcatgtagtgaggggttagctggctaaggctgttttataagcaagggtaaaaaaattagaggggttgtttttaaattttttaccttggagtcatttctgtacaagatctcaaaccgataacttgaaaactgctgtgggaatcagtgtggggcaaacaggaaacagataacgggcagttaggctagttacagttatgccaacaaagaaaacagaagccccaaaagatcactggcttggtaggaagcttagggtatctttaagataacattaaatagtcttcatctgtgggccaggcaccttggctgtcacctctaatcccagcacttttggaggctgaggcaggaggattacttgagcccacgagttcaagaccagcctgggcaacatggcgaaaccacatctctacaaaaatacaaaaaattagtcaggcatggtagcatgcacatgtagtcccagctacccaggagactgaggtgggaggatcacttgaacccaggaggtcaaggctgcagtaagccatgacagcaccactgcactccacaacagagtgaggccctgtctcaaaaaaaaaaaaaaaaaaagtcttcatttataaaacaacatcttccattttcaccaacttacaaatgattctgctttccaaagattttagttgtaggttggtcctttaaaacatgaagagtatttttcctatggaggcaatggtagaaataatggctacattcccaggctaaatctaagacaaaatatagttaatggcatttacaaggataaaagtaaaaagtcataaatctctatgtgtgtgtttaggtgtgtgtgtgtgtctatgtgtgtgtgtatatgtatatatatacacagagagagagagagagagagagagaatttataggctttttgggttctaatagttagaaaaagggcacaggtaactatttagagcatggtagccaatgaagtgactagagccttcacccctattcttctgtcctcagatgaatcttctgactctagcactttgtcccctgccctagtagtcttagtatggagactttccctcctttcttttaggaaaggaataaggaacagttccagaaacatgtgtccttgtgcatgggctcatctagacacattttgtgcwccaggcattatcattttctgattagtcactaccattggccctgtttggtaaataaggaaaccagggcaatgatgttttaggccaaatctcaaaaataccatatcagcaggacccagagtcagagattagactccagtccagatacatcttctaaaatcactggtcttcagatttgtgaactggttttttcctcggttggaagaatttcccaccagaaccaacacacagggttagaccagggcatgaaactgaacacatgcccccttagttcctttttcttcaaaatgaaactctctcagtaggaacagattcttactcatctattgctgttaggttcatcatckctaaaaaaaatatttatgtgaagytaaccagaatctgaaattaattcagatttgattccccctgctcaagtgcacttggtcatcagcaggctgaattttagaagaaaagatttcaaatagtagtctttaatactttaaakgattaaaacagtaatgcaacactgtctacgtgctaggacctgaactaaatacttggaaatattttattttatcaacccaatgaggatgatacaattattatgcctctttaacagatgaagaaattgtagtttagaaaagaaagtagctgttcaaatacacactacactacaggtggcaaaatagggctttcacctgggtaggatgattctagaatgccactttacagccactgaaatatattgcctcccaaatgattctttctgctcaaagagttttttttaagttatctacttatttatattctgcttttttcaaaaagaatgtgagaacagtacaaaatgtgttcagtatagcaaattaaaattaattaaaaagtaagaaaaagaagccaatttgggcaacccactcgggtccccttccacgctgtggaagctttgttgtttcgctcttcgcaataataaatgagcttgatgttttattgagtacaaaaaaaaaaaaaagaaagccaaatttaaacttagggtacaaaaatcatttggaaccaaggttgaagttatggcacaaaaatgtatgtcacaaagttttatatacttggtaggagagggtctcagatctagctctgagtttccttacagccagtcaaaggagaaccatgtgatattccttgtgtttgtaagataaaaacacattagttactcagatgaggctgcacaattcctaccaacaagaccaaagtgaaattctcttgtggattctcatagagatgatgctgtgagctgtaatggcacatagttttacagtattagcagctgtccctcaagggaagaatctgcaggtaggatgagatggcagattgggaagggataaacacttgaatggacatattgggtcttgccaccaggcaatttagcaattctgtcttcttgagtagcacggagaatggaatggaacctcaggaggcatctgcatcaacatgtctgttctgtattagtgtctaccactgtttattaagccagttcctcaaatctcctttgacacagatagggtccacctaacaaatacctaatatacttcaaaagacagttttgagagtgggagtcttccttctcccttacttgaaaaactttaaattgtctaatttttgctaatgccttttctctattttctattttcaggcaagaaatccaagagaaggtaagttttattagtggcgaggagtttccacatctgctgattcrttctctacttccttaagttacttcctgctctagctagacacattaaccccatagtagtttatttacctggggtcctcatccaaatgaccagataaggtgataaatctactagcttcctttcagagctgtgctttttggtgctagtggagctgaatgaatgaatgaacgaacaagtaatccctattagaaaagggcagtttatgtaaagggagatttttctgattacctcagaattttttctgagggttaaaaacattgtggtgtgttcttcttgttcttaaatatattatttaagaaatattcaattgaacaagcacttattgagaaatgaataaatgcttattcaattgactatttgcattcaattgctctaacaggcattgtccttcagaaatgtgggaaagatagggagcatgaattctacctacagcttccccaaggaggcaagtatttttcagtttggtcttgaagctcaaatttcttctactggagaaatagcacagtgggaggagatgcagacatgtgaaagttgatggcccacctggcagaaatgaagatggaaaaatatttctcagtatctagggtttagtgacttgctctggaattttaggaaggagagtttaagtaaaataaactatgaaaggaggactttggtgacatattcagtacccagctggacaactgagcttcctttaaaatgctagaaatgaagtgagatgatttctgaagggattggatgctggtttgggcaaccatcctaccaatcacaaacttagtatgggccattgcttagaatgcaaaggaaaaagtggggaaaaatgaggcaccagaagccagatcataaactaatgtataagccatgtgatatgggctttatcttgaggtcttttgggatatcactaaaggggtttaaacagtgagtagccttacctctggcatcttataaggtcaccctgcagagcagtatggcaagtgtgggagacaggtgagcctggattcaaagagacttgttttggaggcatttgcagttattagattaaaaccgatggcgcctgtctagggaactagtagtaagaatgggttcatgaaataagaggaggtgatattaactgaatgtgtctgttaattggctaaaagtgagagagaagaatcaaattatcatctttctcacctggaaactggcggatggtagtcctgtttacttctgagaagggaacataaaagaatgagaggttttggaggtaaagatcatgggttcagttttgtactgagctttgggtgtatgcacatcattcactgtggctcattggacctatccaaagcacagaggctatggcaggagaagtggatttgggtccctcacatttcaggaggtaactgccatctcaggagtgggtactatcatccagggagggtgtgagtgctttaagaatggaagaggacctgggagagagtatgggagccagaggaacatcattatctaataagtcacctaagggaaagagaaatgaaaagatgttgccaggcagggagaaggaagaggagaaagagtgtggggtaatgaatgccaaggaaacaaagaaaggggaacggtttcaaacattgccaagagaaccagtaagtatcccctggatgcaacaagggtgtcagtggggagactatttgcagtgcagacatcaagacagaggtcagacggccaagcattgagcattactgaggatgagaaagtagagacagaacaagcagtcatctcttttaaaatgtttggctgtgaaggagaagtggggcaggggtaactggatgaggatgtacgatcagtggaggttctttttattctttttaattactctgtcttctctttactagtgcaaatggagtctagtgaggaaaggcttctttctctgggctggtctccctatgtctgtggcaggaaacccacagatgtgaagatttctttcaaactcgcacctactgagtgaaagtattttctggcacaatctacccagagctgttttctggctaccggaaccacctgttttaattgccactagatggaagcagatcaactagattttttttttttaagatgtccttgaggcacaggaggagagactggctggaagaatattagcaaaaagctaattaccatgctaagcaaattgctatattaagtttaatggttcactgawtttttataatcagtcaattaatagttgtttattgaacatttttgtgttggaaactgctaagctttcttgagacagcaagaggagtcagcctggtccctgatttcaggaaaattattacctagctggggagttaagacaggaatatagaaagaaaaaaatcagaaaaatacaaggcagagcatggtaatggccaatgggtgctatatttaagaaggaaaaggtcatttggcttggtggttatagaaaatgttataaagaaggttgcttatgaagaatagataggatttaggtatatggagaaaagcaggaaaggaaggcagtctgtaggaaggaaattgtgtaagcagtggtatggtagtgagamtatgaaagcatttttcaggggccactgagcagaactttcttgagcccatggcttattgaggagttgtggagttgaagttggaaaggaaggctggccccaaraacataagtcttgaatgcttcaccagatggtctagaaaggcctagcaaagaagaattatttgcccagctctcatttattgaccaaggctgtattaattcataagaatcacagaattctaggtctgaatatgatcttggtggatatcacattcaaactctttttgtagttgaactaattaagtaagttttctataggccttgagcaagtgacagagttagttacaataatcataaakctttatcaaatattaattccatgttgtatactgttatgaatggtttacatgtcttaaatcatgaaatatgcctttaagtctgtgggagaagggtctatgaacatcttcattactgataaagaaacaggcacagagaaataaaatagcctgaggtcacaataaatggcaatgctgagatccatactcatttggatccaggaatcatgctcttaacgcgtatgcttttagaactcaagacccttgactaccagcttagagtggcaagtcccaggcaccctccttttccagtaacgtggttttttttttcacactgaaaccattgtgtgacggcactgaggaagggtggggtagaagtatggtgtgtttttagaacaagtcaaaggtaaaatgaatactatcacactaaacaccatgagcctttttttttttttttaagttcttgggtgaattttcatagtagtttgtgttcatttctattagcttttgaatggtgaatgaatgactccttgggcatttgtggtttcatttcttgctgggttattttgactcttctgcaaaatgactctgtttatcacctcatttggtttctactgtctaaattctggcaggatagaagctacacccaagatacacaggaagatatgatgccaacctcagaggagggcatatgtgaaattttgttttcagaaacatttttttgtctctattttggcaagcacatttgcagctgctgaactgtggtttaccctgacagttcatcatgagaccagctcctcagaatctggttctccctttgaaaggtgctgtgaagacataccatatttcattctctccttgtcctttccaagaataagacagttgtgtcacacaaaaaaagtgtcacttatttctttaaactaaatgtgttaccatctcattaaattatatcccaggatataatttatcacgagtttataaccaccactatttcatgagtttaaattttctccaatttcactttccatttaagcatgccttctaattccttgactttccactgctcaaaatcaatctacagctgggctcggtggctcacgcctgtaatcccagcactttcggaggccgtggcaggtggatcatgaggtcaggagtttgagattagcttggccaatgtggtgaaaccccatctytactaaaaatacaaaaattagctgggtgtgctggcacgtgcctgtattcccagctactcaggaagttgaggcggaagaatcgcttgaacccaggaggccgtggttgcatgagctgcctccgtgccactgcactccggactgggcaacagagtgagactccatctcaaaaataaataaataawtaaattaaattaaattaaatwaaaataaacataaatttaaaaaatcaatctacactgtccttcagactcattagatctggagacaaagaccgtatgcaccacaaaaatttctccaagtggggtctgtgcgccagtggcataagcatcactaaagagcttgttaggggtgcagaatctcaggctccactcagacctactgaatcagagtctgcattttaacaccatctctgagtggtaagcacatgaaaatctgagaagtgctgctactagggtttgcttacatttgttcatcttcagaggttcctaaagcctggcctcttgtctgagatttccagctgaaagcatttccttgctcctcttctcatctctaatgaatatttacctttactactaacactccaagttttgcaatttttaaactcttattatcttttgtttttctttcagtatgaatgacccatattaaatcgcccttggtgaaagaaaattcttggaatactaaaaatcatgagatcctttaaatccttccatgaaacgttttgtgtggtggcacctcctacgtcaaacatgaagtgtgtttccttcagtgcatctgggaagatttctaccygaccaacagttccttcagcttccatttcgcccctcatttatccctcaacccccagcccacaggtstttatacagctcagctttttgtcttttctgaggagaaacaaataagaccayaaagggaaaggattcatgtggaatataaagatggctgactttgctctttcttgactcttgttttcagtttcaattcagtgctgtacttgatgacagacacttctaaatgaagtgcaaatttgatacatatgtgaatatggactcagttttcttgcagatcaaatttcacgtcgtcttctgtatactgtggaggtacactcttatagaaagttcaaaaagtctacgctctcctttctttctaactccagtgaagtaatggggtcctgctcaagttgaaagagtcctatttgcactgtagcctcgccgtctgtgaattggaccatcctatttaactggcttcagcctccccaccttcttcagccacctctctttttcagttggctgacttccacacctagcatctcatgagtgccaagcaaaaggagagaagagagaaatagcctgcgctgttttttagtttgggggttttgctgtttccttttatgagacccattcctatttcttatagtcaatgtttcttttatcacgatattattagtaagaaaacatcactgaaatgctagctgcaagtgacatctctttgatgtcatatggaagagttaaaacaggtggagaaattccttgattcacaatgaaatgctctcctttcccctgcccccagamcttttatccacttacctagattctacatattctttaaatttcatctcaggcctccctcaaccccaccacttcttttataactagtcctttactaatccaacccatgatgagctcctcttcctggcttcttactgaaaggttaccctgtaacatgcaattttgcatttgaataaagcctgctttttaagtgttaactagtttgcctagtttgttattttgaaattatcatatgttttgttttctccccagtgagattacatgctccttcagggcagagtttgtgtcagatccctggagtatctagtgcattacttgacactcaataaatgaatgttcaaataaatcagaaagagcatacagtgcactgctgatataagtttcagcaaaccctctttctctatggcatctgatgacctgggcagatatcacctaatgtcaacagctgaattcttatgagagaatagagccctttcagaagctagctggaaatacctccttgtcccatggccaatatagatttcatacaaatttgcacacattatgagaataattttttggtaatgattacacttttctttctcaaagacatctcagattctgtattatagcaaaagctgttgcaaaagattctccctatagtacactgtaaatcttggatgtgcaaatcacattcatgtggtttagggtacatcccctggaggtgtacagtgcacacgtgcacagacacacatggcaaccctgacaaaaatgtttattccactaacacatcagggccaaggaacccaaatggacactactccttgtaattatgatgtatatagatttaaaaataaagttctatattcaagctctaggattcctatatgatcttaggaattacataatagtaatcccataaatcaagattcataatataaaattctccagaaaccttggtcttaacctccctgagacttacttcctatgcccataaaacaagaatgaaatttgccttgcttaccccacagggttattgtgatggtaccttaagtatgaaactgctttgtgaactgaatctgaaacacagactttttttttttttttcctcactcaaatcttacctttcatgctttcatggtgtaagattctggttcttatcctaaggctggaacagatggagctctgagtccttatcctgagattagaagccaggaagtctttcacttgtgttccaataggaactcagccctcagattttcactgcacagggtcagctctgccccctgcacttctgcttgcgggaggaggaagggcctgggacagggagtcagaggcatcagtgggaaccctgcctctgtctccgtgatgtgaccctggccagttgttactctctctgaacttcagatttatttatgaaatggggatcccattatcttrgtcacatgattgtgctccacattttatgaaataactcctcctatgctttactcagagtaccaagttcatgaaattgtcagagtcccaggaacacagaattattcattccttctgatttgttcacccaagatcaatgtgcctgggctgtattattgtagtttcctacagaaatagttcaccaaattaaaatctaatttttaaaaaattagctgggcatagtagcacatacctgtagtcctagctagtcgggaagctgaggcagaaggattgcttgagctctaatgatttaatgagaatagaaagaagcaagaaagaggcttcttgtccaaattgcactgtggaaaatgaataaatgtattctttagacatctatatttttccccttaaacttcctcccatctgccagttgacttctctgtacagttctttctccaaagttctttgcattgccctctttcaacttcagcaatttgatttttcccttctgttcaaatgtcctattatggacattttatggaaagaaaatctgccatcaccataacagcctacccaccatttatgacaaaggacagggaaattattaggagaaataatgagatctttacttccctttggcctttgtggccttgtctgatccagtgggccccaacattttatgagatatatacagccttccctgcgagactctgaaagggttttagttaaaagtaatataataattatcacgcgtgtcggtgtgaagagaccaccaaacaggctttgtgtgagcaatgaagcttttgaatcacctgggtgcaggtgggctgagtccaaaaatagagtcagcaaagggagatggggtggggctgttttataggatttgggtgggtagtggaaaattacagtcaaagggggtttttcacttgtgggtaggggtgggggtcacaaggtgctcagtgggggagcttctgagccaggggaaggaatttcacaaggttaatccctcagtcaaggtggcgcaggaacaaatcacaatggtggaatatcatcagttaaggcaggaaccagccattttcacttcttttgtgattcttcacttgcttcaggccatgtggatgtatacgtgcaggcttgggctcagaggcctgacatttctatcttcttatattaataagaaaaataaaacgaaatagtggtaaagtgttggggcagtgaaaatttttgggggtggtgtggagagataaygggcgatgtttctcagggctgcttcgagcaggattaggggtggcgtgagaacctagagtgggagagattaagctgaaggaagattttgtggtaaggggtgatattatggggttgttagatgaaactgtagcaggacaagacacagacaaaacccctcagacactgagttaaagaaggaagggctttattcagctgggagcattggcaagactcatgtctcaaaaaccgagctctccgagtgaacaattccttttcctcttaagggcttacaactctaagggggtctgcgtgagagggtcatgactgattgagcaagcagggggagcaagcagggggtacatgactaggggctgcgtgtactggtaattagaggaacagaacaagacagggattttcacagtgcttttccatacaatgtctgtaatctatagataacataactgattaggtcaggggttgatcttaaccaccaggcccagggtgtggcatcaggctgtctgcctgtggatttcatttctgccttttcatttttacttctttctttggaggcagaaattgggcataagacaatatgaggggtggtctcctcccttaaaacatttgtcgtatagaatgattggtgatggcctggatacggttttgtatgaattgagaaactaaatggaagacacaaggtctgcataagagaaggagaaaaacaggtattaaaggattaagaatcgggagaacccaggacatctaattagagtgcccaagggggttcagcataattacttgcttggttggcaaggtttttggctctatccttgagttttttttatgttgtcatataccaggccagattgatttaggtaaaaacaacactcttcatttaaaaatatgcagagtccccttttttagcagtgagtaaattgaggactcggtgattttggaggaaagagaaattgtaaagccagcaattgtttgttaaagaaggattagaaatggctaggagagagtgagtgagattgatagtgtggtggagatagctggggagaggtagagagtggcataagaatgggaacaagaataagagtgaatataaaagtaaagaatagggctttattagggtgaaagtattggagtgtaccttgtcactgaagatcttctatccactttaagagagacttaagggtggcggtttgaggtaaaaccaggagatatcagttatgatggtttggaggaaaagtataaatcagcactgtaaaaaagggcagggcatttacaagtagttgagaatggtgaataggagtatgactagacagaagattgtagggatgacaagtttttggggcacagttcaagttgggctggtgtctygaatragactggggcctaataaaaaggagcgtccatacagaatcttaaatgggctgtaccttgtagcatttcgaggacaggcccgaattctgagaatggcaagtggtaaaagtactgtccagtcctttttaagttggaggctgagcttggtgaggtgtgtttttaaaagaccattaatcagttctacctttcctaaggattgaggacggtaaggggtatgaaggtttcactgaataccaagagcctgagaaactgcttgcgtgctttgactagtaaaggcttgtccattatcagactgtatagaggtgggaaggccaaaccaaggaattatgtctgacagaagggaagaaatgaccacggtggccttcttaggccctgtgggaaaggcatctacctatccagtgaaagtgtctacccagaccaagaggtactttagtgtcctgatttggggcatgtgagtaaagtcaatttgccagtcctggggttggggagattagctggacatgatcagcagggagagcacgtgtgttttcatgaagaactatgcctggataggtaatggatgaagaagaaatttgggttgactgaggtaatgggggctgtccatgaagccttgcggcagtacagcccaggtaagttgctgaggctgatgggtgtcagggtcagtccaagtgaaagtgaagagaggctgggatgaagggtgcaaatgaatagtaaagaaagcatgttttgagatccagaacagaataagggttatggaggggttttggagggaggtattgaggataggagagtatatgggtttggcaccatggcgtggataggcaagacaatttggttgataaggcacagatcctgaactaacctgtaaggcatgtccagtttttggacaggtaaaatgggggaattgtaaggagagtttacaggctttaaaaggacatgttgtaacaggcaagtgataacaggctttaatccctttaaagcctgttgtgggatgggatactggcgttgacccaggtaagggtgattaggttttaatgggatagtaatgagggtgtgatttgttgccagggagggagtagaggtgtcccatacctgtgggttaaggtagggggatatgagaggaagtggcaaaggagttgccacttttgggttgggaagaagggcagcaatgagatgtggctgtagtccaggaatagtcagggaagcaaataatttggttaaaatgtctcagcctaataagggaactgggcaggtggggataactaaaaagaagtgtataaaagaatgttgtttaaatcggcaccagagttggggagttttaaggggtttagaagcctggccatcaatacccacaacatttatgaagacaagggaaacaggaccttgaagagaaggtaatgtggagtgggtagcctctgcattgattaagaaggggacggacttaccctccactgtaagagttaccaaaagcatctgtgatggtccaggaggcttctgaggcgatcaggcagcatcagtcttcagccactaagccaagaagatctgggaaggagtcagtcagagagccttgggccagagttccaggggctctgggagtgggtgctgggcaagttggacagtccgatttccagtggggtcccacacagatggaacatggcttaggaggaatcccaggctgagggcattccttggcccagtggccagatttctggcacttgaagcaagatcctgatggaggaggtcctgtaggaatgcttgaccactgtggcttaggcattttgaagttcttgtgtactggagatgtggctggggtttctctcacagtggaggcaaggaattgcaactcagaaatatgttgctacttggctgcctctactctattattgtacgctttgaaggcaaggttaattaagtcctgttgtggggtttgagggccggagtctaacttttggagctttttctaatgttgggagtggattgggtaataaaatgcatattgagaataagatgaccttctggcccctctgggtccaaggctgtaaaatgtctaggagttgctgccaaatgagccatggagtgggctaggtattcatatttgatgaaaaaaagcctaaatactaactgagatgggagaggttggataaagaaaaaggagcattaaccttgactatgcctttagctccagccacctctttaa

SEQ ID NO: 8800 - DNA, 67126 bp, Homo sapiens
  misc_feature (1)...(67126): n = A,T,C or G, or insertion/deletion polymorphism (see Tables 1-2)
aaggcaggtggatcacttgagtccaggagtttgagaccaccctgggcaacatggcgaaaccccgtctttactaaaaatacacaaattagccaggcatggtggagtgtgcctatgatcccagctacttgggatgctgaagcacaagaatcacttgaacccaggaggcagagtttacagtgagccaagatcacaccactgcactctagcctgggtgacacagtgagactcagtctcaaaaaaaaaaagtagaaaactcatcaagctgtacagctaagttctgtatacctcatatatgaatattatatcttaattaaaaggaaaagtctattaacaaaaagagttctcaaaaatgctcaacctgaacctccttagggggttggcagaagcattaactaaagctctcctatatttcaccaaaatgtgttggcaattcgtagcctgctggaggaagggaggtgtgagctgttccctgtgttcagctggacagcctcccactctctataggcgcttcttttagagccagctccactgctggtcctggaggttttttggggaaggcgatcaaaaaatttacaatgtccatgactactatagggaatagttctacgatgctggctgcgaaaaccagatcaacttattaggcacagtagacacagtgataattttactgtcccatgaaaatgttttaattttaatttcttttgaaatcagaacaaaaataagaatactgtaataatgagcatataataatgaattcagccagcgttatatgtgtctttataatgcaattggaaactctcattttaaatttttttttttgaaggaaaaaggggtccttaaaggcaaaggtgcctggggcccacacaagtcataatgcagccctgagtaaaaggaaaggtgctagggactgaattgtgctcccccaaatgtcttgtgttgaagccctaaccccccaaggtgactgtatttgaagataaggcttttaggaggtaattaaggttaaataaagtcataagggaggggccttaattcaataggattgttgaagaagaggaagagagagagaaatctttctccctgaaagcacacacttaaggaaacaccatctggggacacagggagaaggtgctgtctacaagccaggaagagagccctcaccaggaaccaaataagctccccatgctgawcttgaactctctaacctctagaactgtaacagataaattcctattgtttaagtcacaccagtctttggtattttgtgcaatggcctcagaygtcactaaatgacattgattacattctattaccccaaaaccctagttctatcttcattttctgttattgaactttaggcttcaggttaggaactaggcaagcttgcaatttgttaggtaggtaggcattctttttttctctgcctatttgaaggactacctactttgaaggttgcagatcagcagcagaaaaaaattttttaaaaagctttttaaaaaaattttagaagaaatcaaaggtttttttggtaataaaattttattggcttggcatggtggttcatacctattatccagcactttggaggctgaggcaggaggatcactttagccagggaggtcaaggctgcagtgagctgtgatcatgccactagactacaacctgggtgacacagtgagactctgtctcaaaagaaaaaagaaaaaagcacagaaaaataaataaaattacttataaatgtgtgaaaagatttttaatctcacttataattaaagaaatacaaatcaaagcatcctaattttattttatttatttttttttttgagacggagtcttgctctgtcgcccaggctggagtgcaatggcgtgatctcggccactgaaacctccacctcccgggttcaaacaattctcctgcctcagcctcttgagtagctaggattacaggtgtgtgccaccacgcccagctaattttttttttttttttttgagacggagtctcgctctgtagccaggctgcagtgcggtggggcgacctcggctcactgcaacctccaactccctggttcaagtgattatctcacctcagcctcccgactagctgggattacaggcatgcaccaccacccccggctaatttttgtatttttagtagagacggggtttcactatgttggctaggatggtctcgatctcctgacctcatgatccacccacctcagcctcccaaagtgctgagattacaggtgtgagccatcacgcccagcctaatttcttgttgcccagactgcagtgcaatggcgcaatctcagctccctgcaacctccgcctcccaggttcaagagattctcctgcctcagcctcctgagtagctggaattacaggcatccaccaccatgcctggctaattttttgtatttttagtagagatggagtttcaccatgttggccaggctggtcttgaactcctgacctcaggtgatccacttgcctcggctcccagagtgctggaattgcaggcatgaaccaccgcgcctggccaatttttgtatttttaattgagacggagtttcagcatgttggccaggctggtctcgaactcctgacctcaggtgatccacctgccccggcttcccaaactgctgaaataataggcgtgagccaccgtgcccagccccaatattttttaaaataagaaacaaaataaataaaatcacagattgcatttaggtacttccatacattgctggctgcaatttctttggagggcaatttgacaacaatcaaaacttaaatacscatttcctttgatccaacaatataaaagtatttccaacagttctatttgcgcatgattgcaaagatttacatccaagaatgggccaggagtgstggctcacgcctgtaatcccagcactttaggaggctgaggcaggcagattgcttgagcccagcagttcaagaccaatctgggcaacatggtgaaaccccgtctctacaaaaaatacaaaaattagccaggagtggtggtgcacaggtgggaggatcgcttgagcccaggaggtagaggctgcagcgagccatgatcatgccactgcacgccagacttggcaacagagtgagactctgtcccagaaaaaaacatttttaaaagatacaaggatgttcattgcatcatttccagtaacaagtgacaagctaaatgcccaagaagagactgattaaataagttacatagtggatcaaaaattattaacgtaagtatttctagccttcccctaccatctgccagctacagataatttagtcttgggtcaactttctcctctccctctacaagggaaatgttcaaaagtgtttagactttggtgatgcagcatgattgggaaagyagagggcacagaaagatgccaggctttgtggtctccaggcaagctcaggaatgtgacaaagcataccgaaaagaaaagcgggctgggagcagtggctcacgcctgtaatcccagcgcttcaggagtctgaggctggtggattgctggaggccaagagttaaagaccagccaggccaacatggtgaaaccccatctctaatgaaatccaaaaaaaaattagctgggcgtggtagcgcacacctgtaatcccagctactcgggaagctgaggcatgagaatctttggagccggggatgtggaggttgcagtgagctgagatcatgtcactgcactccagcctgggagacagagcaagactctgtctcaaaaaaaaaaaaaagaaaaaaggaaaaggaaagataaatttataatgtattgccaggaccacacaaacccttcatatgtaccaggaatgcaagtagaggaattgagttattttgaaatacttgttggctggtgatttatatttcattgatttagacactgctctgagtatggcttcagaagtgttacatacgcataataaaatcctttacagctattaaaaggagtgaggtaggaaagcatactgctaaaagcaaagaagccagatgagaactgtgtactgtacatccccacttgtttaaaacgtttgtatattatattcacatatgtatgctttccactacatagaagttttctggaaggtatttctgcacatttataaagatgcacatctaataatttcatttccccccattttctacttattgctctgaggtcaacactgaatagtccttatgaagatggtattgaatattctttcaacaaaaaagtctccggatctcaactactggagctcagaaaacgataccccaaagtaggaggctttggcatgctaagtactttgaactaaaggagattaggtctcagtagcagcctcagaaacaaagtctacccatgactttctcctgccctcctgtctccagcggtcttgcacccctgaagtaagtcacaggaaccagaattcttcttccccaaggagggttatggaaacttagaaccttcaaagtaatttataaacttggaaatcttactgtaacattttcttctacctctctctgtctttgagacagggtcttgctctatcacccaggctggagtgcagcagcatgatcatagacaactgtagcctcctgggctcaagcaatcctcctgcctcagcctccttagtagctgagactacaggtgtgtgccactatgcccagctaacttaaaaaaaattttttttttgtatagagggagtcttgctacattgccctggctgagaatttacatttctaacaagttccaaggagatgctcctgctgctggtctggggatggccgtttgaggatccctgcatgaaggcatacacaggacttgatcctcagtgggggcaccaggagctggagcctggggagtgggaagcgagagcacagagctgactgaggaccacgaggtcgtcgtggaggacctaggctgaaggtcctgaagaaatccccatagtttcactgccaggccagccaggtggacatctcagggctgaggaggtgagaaggcaagacagaaagtgaaacagcactttataggatagggatgggaaggtcatctgcatcatgggactccttggggaggggttcggtcattgctccagatgaaggtttagtcttttcatcgtaaatttgctttcactgttgggaaagagatcttcacctccattttcttaacttcaaaatggaaatgacagatgcttttgagtggtctgaatacttgaaatttgagggaaaacgttaccagaaacacatacaactagagttaaagataaatacatatatcaaacgcatggctcaaaaatgacaacgcgtcttctttatctgccttcacgtagaacttaaaacagaccctggtccccacctcgggrtttcctcgcgcccacgggctgcgctgcgcagctgggccagcaggtggcgaggctcccgcactttttttcccgggcctggccgcaccgccaccgcccaccccgcgctccgccccgccccgccccgccgcactcgcggatcgtcacacggtcaggccaccgcgcgtcaccgccccgggctctgctagaaagtgccggggtccagattcctttcaggtgactgggttgggaggagaagtcgctcagcgtaattgtcggagccgaaataaacagagactccgcggccgggcgggaccttacccggaagtcccccagaacagcactacccttcgctgaaacctcgcccgccccctccaacccagagacgaaaagggaaagcatcacggccagaaaccgttggcacaactccacagatactctcccgggccgagccagactccataagtcccgcgcctggcccccggggattgcaggggctgaggagaagggcaacacggggaccttgaagcggggtcgcggsggcgccccagcccgggccagggagtcccggcagcggcacctcccagaaagggcggagccgacgacgccttcttccttcctgaccggcgcgcgcagcctgctgccgcggtcagcgcctgctcctgctcctccgctcctcctgcgcggggtgctgaaacagcccggggaagtagagccgcctccggggagcccaaccagccgaacgccgccggcgtcmgcagccttgcgcggccacagcatgaccgctcgcggcctggcccttggcctcctcctgctgctactgtgtccagcgcaggtgagcggtcgccggccaccgggacgccctgtggggacgtggcggggccgagagccggggaaggcgacgggcccagcgacggctcaggcccgggtcctggggaagttggtctggcgatggagagctcggaggttcctcacttgtcctgtttctgtctccggccacgctctctttcctgtggtctggaagagggtggcagtgggggcttgggtgacctgttctgagcttgttccatctgtggtcacctaatttctctgtgtaggatgtggcaccagaagaagggaggaaagtgggtagagtgggatagggacactacttgctttttaaaaaattctgctacatgcgcacgaactccaaaatttaggagctctaaccactttatttcctcttctcatcacctgaggatggaggtggaagcagaggtaaagagacacaaacttcctcaagcacccggtgaaactgccttgagtacttgacataagtcagcttggtcttctaaagagggcaggttacttttcatcaactcctttttacacctcaggacactgagactcacagggcggtattgaatttccccttgtcactattagccagcgacaggatggggcctggaactcggtgtcctgctgactccttctgggggcttttgcttggtttaatagctttgggaaagagcacctcagtatttgtgtgtctgtagtttcctcttttaaaactggagtggggcagtgtcacgctgtgactcgttaaaccaaatcaggatgagagtgcctccggggaattgtgtccttgtgcacattaacgcccctcacataggtgtggcgtcaataggaagtggtgartcaggggagagggggttccgtggactagaaaaaactctccttcgacttctatttagttctcagaaggggataggtgatgttgatccaataatggactaagagccaggagaagggctccgcgggaggatctcttgagctcagcagttcaagaccagccggggcaacatggtgaaacaccgtcttaaaaacattttgtttttcttttcattgttgaggttgaggctgctgtgagctgtgatcacgccrgtgtactccagcctgggcaacagagcaagaccctgtgtcaaaacaaaaaagagagagaaataaataatagcaattatgtgccktagagaaaatgtggctattctgtttccctagagttttttaaaatttatttttaaaatttatttattttagagacaggttcttgctstgttgcccaggcgtgggggcagtgtcgccatcatagctcactgcagcctggaactcctggcctcaagcagtccttccaccttggcctcccaaagcactgggattattgtgagcaccactcctggcccctcctagagttttagatcaggaccttaaataggcttcccttttttttggagacagagtctctgttgcccagtctggagtgtagtggcgcaatctcggctcactgcaacctctgcctcctggattcaagcaattctggtgcctcagcctcccaggtagctaggattacaggtgcccaccaccacgcccagctaatttttgtattttccgtggagatggggtttcaccgtgttggtcaggctggtctcgaaatcctgacctctagcgatccgccctcctcttttggggattacaggtgtgagccacctcgcccagycaggcttcacattaytaagtagccrtctcttaagtattttttaaatctcaagtacccaaggctgatggccaatgagtgcttcttttatgacastkgggataggtcagaggtttgttgsaagtctcttgcaaaartgcctggaggccttttcaaggtctgtaaaccttaactggaaataatcctattattattttaaaaattcctcatgtctgaaagctttcagtgcacctgaacagattggggtggagccatgaagccaaacagattgggagagagagtgtgtctgcttttagaattcgtaccgatgatagcagctcattagcttcagtctgagcgctagtagagttctatcatggaattatggactagttgtcctgtgtaagatctgaaatacatgttggggggatttttgctttttcttaatgttcaatatgtacagatgatgtaataacattactagactgccttgtttttaaaaccctgtagtcatctaaaaactatatgcagttttgagacatagcctttatttttcccggctgtaattttggtaagctttatcttgagggacttggaacatagagaagcctgggtagaaattaagcattaaaatggcttttcctcagaagactgggaatggttaatcttttgacctgtgagtgattaagaacaaccatctgaaattggaatgactgtgggaaatctttccccatctttcccactccttgactgatgctgtgatcagaaattttactaacataagtaatcaaggggaaaatgagatttttttaaatttgagccagtgggcagagggaaaaggactcgctgaataggcctttgtattcctccagtgtttgttatattacccagaacaaagaatcactctggtcatgaagacagtgtgctctctctttcctgggtaaccctccactcctaaaagggatgcagtattctaagcatggcagattacctacagcggaagcctggatcagtcatctctgatctcgggtgcccctttctgscctttgacctccagctctgtgaagggcatcagctctccagtcaaattgaactgcttgctagcaaaatcctgcccatcttccagggccccatttcacatgctamattatctacgacatycttgtcctgttsccctaactagaatgccttccctctgaagttctgaatctttatttaaactgctgcaacagcatttgctgcctcattaaaagaccttggtgtgggtcttgactcttctctgttcccaagagtgatcttgggtaagccagttatcctctggagcctcagtttcctcctctgtaaaattggattaactgtgccaactatgcttgtgaaagacaaatatttcctaattgaactaccgaattgcaggctccttaagagcaataactgttgctctccaatatcatctacaaatgtggccaggacacttgacttgggactctttttttttttttttttttttgaaacagggtcttgcactgtcccccaggctgaagtgtagtggtttgattgtggctcactgaagtgttgaccctgggctcaagctatccttccacctcagcctcccacgtagctgggrctgcaggtgcatgccaccatgcccaactaatttttaaattttttgtagacacaaggtcttgctgtgttgcccaaggtggtcttgaattcctgggctggagatcctcccaccttggcctcccaaagtgctgggattacaagcatgagccaccgtgctggccctggaatcttttttttttttttcaagaccaggtcttactttggttgcccaggctggagcgcagtggcacgatcttggctcactacagcctcgacctcccgggctcaggtgattctcccacatcaagcctcccgagtagctgggactataggtgtgcaccatcatgccctgctaattttttgtatttttagtagagaaggggttttgccagcttgcccaggctggtctcgaactcctgagctcaagtgataccatccacctccgcctcccaaagtgctgggattacaggtgtgagccaccatgcctggcccactgggattctttgatcataagatatttgggccttgaaatggattttggggagagacttagaaactagtggcaatcaaaattggatttgcagttggtttctaggtgatggcagtgatcagctgcggccagccaggtttttcttcatctggactgtgcctctcactttcaaatttttggaacatttgctttggcarcaaaactttyaaaaaaccaactctctctggtgcaggtgttctgttggaggatttgagagaagctttaaaattttatcttattactgtcccttgcttaggtcacaagaggagctcaaaataatttcataaacatgaattggcttccctagacacaacaaaggataagatcaaaagaattaacccatttaaaaaaatcagtctaggctggtcctaaggtagtgtgttatcaattgatcaaagtcagttacagatcgaactccttgatctactctttcctcctgctcactactgcacttgactagtccaaaacaataagtaagtagtaaaaaaaagaaaaaaagtccgtctatacactgtaaagtgctgtgtaaatgttcataattactatcactgtcttcttcatagttgatggrgggaaggctggatacataaaaaaatggtaatacagtaagaagtgctcagataagaataaagataaaatgttatggagagtccatttttgagctgagctatggaggatgaattaatgtatcaggtggacaagaggaaaactagagaaaatagtcgggagagttgcctaattgttgccctaaactattgaactgttcacttgaaaagggtgaattttatggtatgtaaattacatgagtaaagctcttaaaaaaatttgcagggtgctatatactagattacataagactagagacaaaagctacccaaattttgcatagtactccattgctatcacatccgatcttgttttatcctcacagagcccctttaaggtaggtgtaatgctgtttttcctattttatagatgcagacatcaagggtcaaatttgtcccaaggtcacatagctagtagatggcacattgggtgcttcaactgccatcttctgacttctgtgccctagttttttgaaattcaaggctagattattggtgtttagcaagcttaattgaatgggtgttcagcagatattccacttggttagtagagcagtctcattcaaggcctggttccgtccccagtgtggctcttccagtagtccgtaatagatcaggaatgggtttagcctgctggcctgacccctgattcagtcaccacactgtgaacattccatagggaaaaaactgcagacagtgtatactgrcacccactttcatagttttgttttagttttgtggctcctaaatgtctaagactaactagtaatatgaccttgggtgagtcacataaaaaaccagaagctaaaggggttatctgtaaaacgaagagttggactagctgagcacacctagcactcaaaatatatgacttaaacacccacatgcaggcaggcctggtgcacacacaaattatcctttgttatgtagatacgttcatgccaggttggctataaaacacttccagagatttccgtcaatagaagtcagaccagcccggcagcctccaccctaaatgccctgccatatttgtttggtctgcctccctgactccaaagaagcagcaggcagcttaatctctggacaggattcttcatgccactccctccactccagcctgtgttgtcctgactggccaggccagcctctgctctctggagaagcaatgaggtagggaagttaaccagcaagcccctctcctccatcgcctcactggagcttgagctgggtatctctccatgttttgccattagctttacccatccaggacaggggcacaagtgttggtgccaagccctgcactcccagctctggtggatggccaagtcctaccctggggttgaggactgtcagtgatactgagtaagggagtcattgcttgacaactgcctagagagatactttaaaagataggaatgggaggcattatttctacaagtgaacaagtttatattgaaggaacacttgtataggatcatcatggatgggacagttcatctccagtgcattctccaattctgaggatacatcactgcacaaactggactagagtttaaatggtacagaagctgggggtaggggaggcaggaggacaagggggatgggtggagaatgcttaacttggtgttcaaaatcatgttatttatgagccatgtgacctcagagtatctttgagcctgagttcacttacctgtaaaattctgctgtgctactgcatagagtatctgagaaaatgaggcatgcagtcgatgtttggtatttttgtttcatttatttattttactgccatgcctcgagaacaatagatgttcaktaagtatttgaatatgttagttaatgctttaggatttcctaaaggcagtggaatagaattctcactgagttcagagcttttctgataataatgtgtgcttatggagctcctgaatggggtccaatttagcagttgctatagttgctgagatatagcacaaggggcatttttttttttttttagatggagtctctctctgttacccaggctggagtgcagcggtgcgatctcagcttactgcaacctccgcctcccgggttcacgccattctcctgtctcagcctgtagctgggactacaggcacctgccaccatgcccggctaattttttgtatttttagtagagacggggtttcactgtgttaggcaggatggtctcgatctcctgacctcgtgatccgcccacctcggcctcccaaagtgctgggattacaggcatgagccactgcacctggcctagaaggggcttttttttaacctttcctgaactgttcctrtcgttgaaagaagcttccctatccagtcattttcttagtaattaaactctagagcatgttgtgaaatatccatatgatctaacctttaaaaatagaaactctttagctgtgtaactactaaattctgggtagaagccaaaacaatcagcacttctcatttctgaacttagataatccarttgtactccctcagctcattgtgagttttgacaagttctgcatccatgaacaccagatgtaatacaatagggaatttcaaaggaaggattacacacctaggctctgccctctaggattttaccgtcttacaagggagttgagacaaaagtgagaaaatactctggcaacttctcccaacatcacaactttgcaattctcataaattttgcttgatcctagggcatgaccaaggcagaggcaggcaggtcctacttcatgtgggagagaaggaaggaagggtaggcagttagagtgataggtttggaatactgtagaaaggagagtgggcagagccagagtgaggtgtctgaagcttgtcgcacaggcagtgggaagggtgggttggaggtttctgagcaccagaaaactttgagcattgttccggaagaggcaagcggcaggcatctgcaccagagacactgccgggtccgagtgagggcaggaggctgcacgagggagcctccctgggagtgagcgataggttcgctatgggaggtgggttygaaaggtgcctgagattttcatttgaaactctgttgaagaggaattggcaatagaggaggaaatacaaatagaggaaagattggtttcgtcttaagcactgaggctgttgggcagctagtggaaagtgctgctggagagaagctggagatcactgaagctgagagaggggtttgtggatataattagagcagtgtttctagggaggtgcaggtgaagggactgagagagagatgaggttaaaaacacagaagagaaagagatggaggtgtggaggcccctgaggtggagcagctgcagaggcaggcctgggggccaggaggctggctctccactttcagctgttggtgagaagggagtgaaggctgagcagctcccattgtgcagctgttgagtgcacaggtgctcgtgctcttgcacacggtggggtttggggagggtgtgatgctacagggaggactttcatgatgcagctgattctcttttattgagagtctgtttctggagtcacctgctctgttttgaatcctggctttgccactgtgaccttggacaagttgtttagcctcagtgccttcgtttctgcatctgtaaaaggggtataataacgcctccctcatcaaactgttgtaggattaattgggttaacatattgagaggtgacagcgtgctggcagtcctcagagcccttgcttgctctcggcacctcccctgcctgggctcccactttggtggcatttgaggagcccttcagtcccccactgcactgtgggagcccctttctgggctggccaaggccggagcccactccctcagcttgcagggaggtgtggagggagagacacgagcaggaaccggggctgtgtgcggcacttgcgggccagctggagttccgggtgggcgtgggcttggtgggccccacactcggagcagccagccagccctgctggccccgggcaatgggggacttagcacccgggccagtggctgcagagggtgtactgggtccccccagcagtgccggcccaccggcgctgcgctcgatttctcgctgggccttggctgccttcccacggggcagggctcgggacctgcagcccgccatgccagagcctcccaccccctccgtggcctcctgtgcagcctgagcctccccgacgagcgccaccccctgctccacggcgcccagtcccatcgaccacccaagggctgaggaatgcaggcgcacggcgcaggactggcaggcagctccacctgcagccccggtgcgggatccactaggtgaagccagctgggcttctgagtctggtggggacgtggagagtctttatatctagctcagggattgtaaatacaccaatcagcaccctgtgtttagctcaaggtttgtgagtgcaccaatcaacactctgtatctagctgctctggtgaggacgtggagaacctttatgtctagctcaaggattgtaaatacaccaatcggcagtctatctagctcaaggtttgtaaacacaccaatcagcaccctgtgtttagctcaaggtttgtgagtgctccaatcgacactctgtatctagctgctctggtgaggacgtggagaacctttatgtctagctcaaggtttgtaaacacaccaatcagcaccctgtgtttagctcaaggtttgtgagtgcaccaatcgacactctagctgctctggtgaggacgtggagaacctttatgtctagctcaaggattgtaaatacaccaatcggcactctgtatctagctcaaggtttgtaaacacaccaatcagcaccctgtgtttagctcaaggtttgtgagtgcaccartcgacactctgtatctagctgctctggtggggccttggagaacctgtgtgtggaaactctgtatctaactaatctgatggggacgtggagaacctttgtatctagctcagggattataaacgcaccaatcagcaccctgacaaaacaggccactcggctctaccaatcagcaggatgtgggtggggccagataaaagaataaaagcaggctgcccaagccagcattagcaacccgcccgggtcctcttccatgctgtggaagcgttgttctttcgctctttgcaataaatcttgctactgctcactctttgggtccacactgcttttatgagctgtaacactcaccgcgaagatctgcagcttcactcctgagcccagcgagaccacgagcccactgggaggaacgaacaactccagacrcgctgccttaagagctgtaacactcaccgcgaaggtctgcagcttcactcctgagccagcgagatcacgaacccaccagaaggaagaaactccgaaaacatctgaacatcagaagggacagattcyagacgcgccaccttaagagctgtaacgctcaccgccagggtccgcggcttcattcttgaagtcagtgagaccaagaacccaccaattccggacacaatgtgaagagcatttaaaatagtgcctaagcctaggacaccgccagtgctttgtaagtctttgggtcctgctggcttaggttgcttctttcggcaggatgactttttttttgagaccagttttcactttgttgtccaggctggagtgcagaggtgctatctcagctcactgcagcctcaacctcctgggttcaagctgatcttcccagctcagcctccggagtagctgggactatgggcatgtgccactaggctcggctaatttttggctgttgttgtttttgtttgttttgtttttttgtttgttttttgagacagtttagctcttgttgcccaggctggagtgtaatggcacaatcttggctcaccacaacctccgcctctcgggttcaagcaattctcttgcctcagcctcctaagtagctgggattacaggcatgcaccccccacacctggctaattttgtattttcagtagagacagggtttctccatgtcggtcaggctggtctcgaactcctgacctcaggtgattcacctgcctcagcctcccaaagtgctgggattacaggtgtgagccaccgtgcccggcctgttgttgttgttgtttttaagagacagggtttcactgtgttgcccaggctggtctcaaactcctgggctcaagcgacccacctgccttggcttcccaaagtgctgggattataggcgtgagccaccacttccagccaggatgacttttttttttttttttttttttttttggtcttctcwgctgtgtctctagaagatgaccttttgagaagcaaacctgaatgttgattcaagcccaaatttcctgggctcaggtgttaattttttaagtctttggaacctctttgccgaggtctcaagcaggtagaagacattaataataattccttatatttgattgcgtggtgctctgtagtttactgagtacttactatatatgtacagataggcccttatttgatcttcacaggaacctgtgaggtaggcagagcttatgagcttcatttcccaggtaggaaaactcctacgtggttacgtaacctgctccaggtgtgatcccaggtgcaatccagctcaacaagcacactgagcctcaggagctcttgggatcagaacccaggactcgatcccactccgtgcygccttctcacccacccctcttccaccaagtgggtggaaatagcacttgctttgaaataagtaacgaatgatctttgtgaaaaggaacctaaacagcagtgggccatctttattcacatctatagtaccaagtgctgagtaaggggattttagactccagacacccgtcctgtttgtcaggccagagctgcagtgtgttgactgcacatctgtctcttgtcactcctgctcctgtgggtaaccagccagagtgcccctgaggcagagacaggccaatccctggagagttctgcgaggtctagggaagagttctttgtatttaaaatttcatgtgaacttcagcagtttcctctgcctctgtagtcagcttttgccttttcaaactttagttagatggataatgacttttactcattaggacttttttccattagttggaaacccagagttgcaatacgtttcttttttccttagaatcaccgggtttatgggaataacaattgggattctctttatataaaaatagtggtggaatcttggcacagggttcatatgtggctttgttgaaggcttgttgtcacttccttatttgtataatttccctcctttgtggcctaaacatgactttcaaagagtcaagaggagttaagtcctaatttttattttagaacatctgaaaaatgaattcagagaaaagtgatattgatgccttggatttccccacacatacaaatcccaatctcctgctgactttttctcatgtttttgggcttcagggactgttgtgggatttgtattttgatactgaaggaccaacacagactgacttagcttcttgcctgtgtgcaggtcatgtgccactgtcactggagagaatttcatgttgtgacttctgttcagatttgttttttttttatggctttcccatcagggttcttgggagccatggctgcttcttgatatcttctgtttccctgtagaacagacgattgcaggcccggggccctggcaagctgggccctctgtggctttctgagtccattgtgaggcagaggatcaggtgcgttttgggcagcagccttcagagcaaggcactgacctgatgattcacactgacccctcccctccgctgaattttctgacaaccttgtgactctcacatgggaaatgtgagtggtttttgagaaatctttacataagaggttttaaaattttcttttgagattgcctcggtgtttttccttaaagttagcacattctttgctttctacttcagcctcaaggacaggaagttcattctygctctttacattggggtgttgatgtttgtggttttgttgttttgttcttcatgttactcatgatgtattgatattaattaamctaaatacatatggaaatattctttcattacttagagcttatatagttcctggtgcagatgtgcaaaaatagtgctttagtaattgctaagtcactatcttgcttttctctctactgtgattgagtatttcttacatggaactatagcttcctcttatcaacaaataagcaggaaatagaaattatgtaaataagcaatttccattacctacttcactgacttgacaaataggcatttggtctgctttaattaatatttttcaaaatgttaagtgcctgttgctgttacttaattttgcaggtagcattggaagtttctgtgattgtacttgagtgggcacttcttgttgaaatttaccattgagaccctggtaacactgaagtttgtgttgactttctgtaggtgttttcacagtcctgtgtttggtatggagagtgtggaattgcatatggggacaagaggtacaattgcgaatattctggcccaccaaaaccattgccaaaggatggatatgacttagtgcaggtaagttcattatcttaggcactgggaacacaaaatgctgatcacaagatcctctgtaattattccttaaatgttattgcagggtggaggtggagatgagactaacaggcttaagtcttatcccggactctcaaactctaacctgtrgcatacagtgcagagaaagaacaccgtaactccaaaggcttaatttttcaggggctgactttatacctctcataaagtttcccaatagcaggttgctatttagagactgaccttggtacttcgtatgttgcccttgcagcatctgcaaaatatattagaagttagctggttttgattcctagatttcaggactcaaatggactctgttgctaagtggctttgacgtccttgtcccctggtcatttcagtgttttctctgtgttccactgagagcctgtgaattttggctgctaccaggattctgattcctgttctttttttaccatcctgtgatacacagggatattagaactggaaaaatcatgtgaaaagcctggttttagaggcttaaagtaatcaaaagtcaagtcgacatgataacagagttcctaggctcacttgttcgtttcttttctgtttttgagacagaaggagccttgctcttttatcctggctgaaggctagagtgcagtggcacaatcacggctcactgtgtcctcgacctcctgagctcaagcaatctctcaactcagcgtcccaagtagctgggactacaggcacatgccacaacccctggctaattttttaaaaatttgtttggggagatggggcttcaccatgttgcctagcctggtctcaaactcctaggctcaagcaatccaccctcctcagccttcctaagtactgggagtacaggcatgagccacrgtacctgtcctcacttgctgctttcatcataattattaaaggtttcaactttccctggaattactaatagaaatagtaagtagcactctggttgaattgaatcaaacaaacaaaaaaccctaagaagacataaaatgattgtcaggagaggagagaaagcttccaaataaaaagaaaattagaaacatctctacttgtgaataaatagtaaatgtgtagccttttaaaataattctataataactttgcaaatacaggatgtgtcttacccttttgtacttcaaaaggattacrtgaatgaatgtgtcttagttcactgaggaatgttgaccttactctaactgttgcctactcccgtgtctgtgctctttcacctgaaaggaactctgtccaggattcttctttggcaatgtcagtctctgttgtgatgttcggcagcttcagacactaaaagacaacctgcagctgcctctacrgtttctgtccaggtaggttctgctggggaaacagaacaactgggctgtagatacttgtgaactggtaatgctcagctttccatttattctttgtttacatatttttatttattatatgtctatattatatgtatattatatatttatacatatatgtatacatgtaaagtaggtgaatatatatttatgtattaaaaatacatgtatgtataatgtgtatgcatgcgtgtgtgtataatagagacagagtctcactctgctgcccaggctagagtgcagtggtttgtggtgtgatcacagctcactgcagcttaaacttcctaggctccagtgattgttctaccttagcctcctgagtagctaggactacaggcatgcactaccatgtctagctaattttatttatgtttttctttatttttttttttttgagacagactcttgctctgtcaccgaggctggagtacagtggcatgatctcagcttactgcaacctcctcccgggttcaagcgattctcctgcctcagcctscccagtagctgggactgcaggcacatgccaccacacctagctaagttttatatttttagtagaggtggggtttcaccatgttggccaggctggtctcaaactcctgacctcaagtcatctacccgcctcagcctggttattacaggctgggattacaggcatgagccactgcacctagcctaatttttatttttttctagagatgagggtctcactatgttggccaggcctggtctcaaatgatcctcccaccttagcctcccagagtgctggattataggtgtgaaccacagttcccagccagttttttttttttttaaagtcagtttttgttttgttttaagaaagcactcttacaatttgtcagaaataaagagaaaaacaataattaccagacttggttcacttcccagttgcattcagagttgatgcttggtttcctctgcgatgttctcaccctgcagggtgtctgcactgcggccaggctcctttcaaacttgagctgtgcactgtggggaagagaggttcctaggggtcctgctcaggtgcctggcctgagactctcatcatgcagtccttcctctccccccatgctttgctttgcacatcattcttgtccctccctctggtgaagggttgtgatagagtcaggtcctcagtagagcyggcctcggggagctgttaaaaattttgttctgctgtagctggctggttttgtcaaacttagttttttatctgttctgttggctatgaccctgagcagtgaaaaagggcttggtaatagatgttcttctctaggcctagccagcaattctcaaatatgcaaaagagcaagctggtagtggtctttagaacagcagattgtggtatctttctaaatttttcagacttcagcacactgataaagatgtttgggaagcaaatattaaaaagggaaaatgcttctctgcacaaatatcactgcaggtggtgatagggcacaagttggcttccagtgaagaaattctgcttcttaccaaaagttaacaatagagaatggaaaaccaccactaaattgttttttcagaacaacaaaagttgaggctgtaattgggccagcatatcctatgaaaggcttgtgaacattgatggaaccaaattggagccttgtacactcagtcaaaacacatttatttaggatccaccgtaggtgaggcattatggacatacggacataaacataaaaagatagccaacctttctccatattatcagaggtaccaaagcttgatttataatagcaaacaggagaaacaacctgatatttggaaaaatatacagctgtcaaaattagtgattgtgggcattaaatgtagtaacatggaaaaggtttgaaaactgtgtaccccaagagtgattcctattagaataatacaattgtggtttctggctttgttgcagtaaagcagtggggctcctgaaagaaagagagtctgtgcttctctgtctccttcactagaacagagactcttgaaggccaggacacacttttttcattctttgtcttacatggtcactgggactgaatcggagtctaaagtaatcttgattgcaagaatgcaagtctaatgaaacagcttttgcaagtaacagtggaccaaagggaaaagagagctcttttatcatgtaacaagtcaacattaggagcttaaactttgaacctgaaggatagcaggcagcttatggttcttgtgcagttgtgtgctcctgaagtgcatgcagccagagaacaacattgctgttctctatctttacaaaccatggggatttctccttgtgtttcaggagggcctagtgattttccggggcttgaaagaaaacctttcaataggttataagatgaagattctcataattctcattattttattttcttcttaatcaaaactgtcagctggtgcagcgctcatgtcgataatcccagcactttggaaggccaaggcaggagggttgcttgagtttaggagtttgagaccatcctgggcaacacagacccacatctctacaaaaacattttaaaaattagccaggtgtggtggtgtgcacctgtagtcctagctacttgggaggctgaggtgggaggattgcttgagcctaggagctcaaggttacagtgagctgtgatcacaccactgcactcagcctgggcgacaaagtgagaccctttctcaaaaaataataataattgtcttcctgatgctccaaagtccctttactctaggtcagagaatgtatgtctctaaattataaagtgcagaattcagagaagcatctctctctttttgaaattataattggacacaataaatgcagaaagtaattagggcattttttaaaggtgtgcctttattttaacatgaagttttaagtttagaattgctggtttttaatatgttctcttggtaatttgtcactttacagtaagtttaaaatattctttgtctatttaaaatcgttcttgctggccctattatgtgtgagatcatgcagaatataatttacttttcctttagatgtccatcctgtttttataacctactgaacctgttttgtgagctgacaygtagccctygacagagtcagtttttgaatgttacagctactgaagattaygttgatcctgttacaaaccagacgaaaacaaatgtgaaagagttacaatactacgtcggacagagttttgccaatggtaagtaaacttttaattattcctcttttacagctggcatcaggacagcagagcaaattgttccttttagttgtcctgtcaactctggaaaatcacaattttcagttccattggccaggaaataagagttgttgctttgcttgtatcctaggacttgaactgcaacgaatataaaaatctccttaaagcgcttgctttaactccccctaactttaacttcccacatggaaaattttagtatgtgcaagtttgcatccatacacttcagtaaccattggatctttgactctaacagacatgagttgtgtaatgtcataaattactgcaagactgagaagatagaactgttaatagttggcagagaagaggtcatgacttgcaagaatcagatcaccataaaggaaagtcagcaggtctaacagatagcagaaatgatcccccagcattgaccaacatacaacatttaattataatgacaaagtaaaaaggtaacaaaaaaattccatagaaaaaaggtctcattcacaaaagcaacaaaaaataaggcacttaggaatccaaaagatgtgacatacaaggcaacctgactgaatggagagaggtcattttgtccagaaacagaagcctgcatgtatggaaagtggatgtgtaacacgtgtgtcattacaaatcattgagagaaaaggtgggctagttgataaatgagatgagaaaatagattatatttatctaattttaatttttacagaaaataaaaaaatcaattgtgtagattaaaaatcccaattggaaagttttagaagtaaatatggaaagatttctagacaggagaggaaaagcagaaaccataagaaaaatatttatgaatataaacaactgttatctagagcagacagcgaaatgcaaatttgaacagtaaactaccatttcacacctcatcagcttggcacaaattaaaaagttggtcaatttcaactgtgggtgaaaatgtgaagcaataggaatactaatgtactccaccacttacaaccataatttggtacaatcgtttcaaaactacttgaaaaacaactttgcagtacgtagtaagttgaagctaaccctcctcccagaaatttsacttatagatgcctgccttagagaaactctaaatgcatataaacctggagacccatataagaacacccactgtaacactattgtgattgtgaaaaattgaagacctcaagaacgagaagacaagacacagactgggagaaagtatttgcaaaagacatrttagtaaggactgttattcaaaatatacaaataactcctaaaactcaataagaaagcaaacagcccaattgaaaaatggacaaaacaacctgaacagatacctcaccaaagaaggcatacagtggtaaataagtacatgagaagagatgctcaacattatgtcattagagaattacaaattaaaacaacgagataccactacacatctattagaatggcaaaaattcaagacgctttcaacaccaaatgctggcaatgagctctcattcattgatggtgggagtacaaaacggtacagccaccttggaagataatttagcggtttcttacaaaactaatcatactccttggtatttacccaaatgagttaaaaatgtgtctaccccaaaacctgcacgtggatatttgtagcagctttgtccataagtgccaaaacttgtaagccaccaagatttctctcagtaggtgaatgggtaaataaactgctacatccacacagtggaatattatttggtgctaaaaagccatgaaaattcagtgctatcaagccatgaaagtacatggatgaaccttaaatcctattactaagcaaagccaatctgaaaagactactcactatgattccactatatgacgttctacaaaaggcaaaaccgtggagacagtaaaaagtcagtgattgccatgggttaggagagaggaaggcataagtagagcacagaagatttttaggtggtgaaaatactctatatgatactataatggtggttacatgtttatatgacattttgaaacaaaagtactacatacttaaaacaagtacacaaacatgcatgggaaggataaacatcaaattcaggattgtgtttaccttagggaaggggctactgtcagggaggggtaattggggagcttcaactgaatctatagagtgtgtgtgtgtgtgtaagtatttttttawtttttkgaagagacgggcctcactgtgttggtgaggctggtcttgaactcctggccttaagtgatcctcctgcctyggcctgccaaagtgttgggactgtaggtgtgagccaccacacctggcctatagtgsattattatttttatttagtttttaaattatgccatagccagttgttytgaatagtgcagtactacaaaacagagtcaaggtctcatgctgtcacccaggctggaatacagtgatgcaatcatggctcactgcagcctcaacctcctaggttcaagtagtccccctgggtagttggaaccacaggcatatgctaccacacctagctaattaaaaacaaatttttttttgtagagatagggtcttgcttttttgcccaggctggcctcaaactcctggcctcaggagatcttcccacagtgctgggattacaggtgtgagtcactgcacctggccragtccattatttttttaatgttgaggcaaatgttgtgaaatggtatgactgatagttaactgggtaatgaggaaatgagaattgtattattctccatgtgttttgtatgcttgaaacataaaataaaacctgaaaaccaaatggtgagctggaagatacgagggaattactcagaaaacagcatacagatacaaagacctataaatcattaaagaaatgacatataacatgagaagctccagagagttggggagagacaataataatcaaagggataatgaggattttccagagtggataagggatgaaccctgagaacttagagaaaattcagcatacaaaaatcagttgtatttctgtacacttgcaatggacaatctcaaagtgaaaataaaacaattccatttactttagtatgggaaatacttaggagtaactataacagaaggcaaaacactttaaagaacagccgggtgcagtggctcacacctgtaatccaagcactttggaaggccgaggcaggcagatcacaaggtcaagagattgagatcatcctggccaacatggtgaaaccccatctctactaaaaatataaaaattagctgggcgtggtggcgctcgcttgtaatgccagctacttgggaggctgaggcatgagaatcacttgaacctgggacgcggtggttgcaggagctgaaattgtgccactgcactccagcctggctgacagagcgagactccatctcaaaaaaagaaaaacagaaaaaacacactaaagaacattattcagcgaaattaacgaggatctaaataaatggaaagacattccatgtttatcaatcaaaagacttaatattgtttagatatcagtattctccaaattgttttatagattcagggcaatctctgttataatcccaactgacttctttgtggaaattgacaagctgattctgaaattcacatagaagtttgagggacttagaatagtaaaacaaccctgaaaaaagaacaaaataggaagactcacacttctcagtttcaaaactaagcaatggaaatcaagacagtggtactggaataaagatagacatatagatcaatggaatataactgagaataaataatatatctatggtcaactgatttttgacaagggtgccagggccattcaatgagaaaagaatactcttcatcaaatggtgctgcaataactggatacacacatgcaaaaataaataaataataatgaaattgggccctacttcacaccatatgttaaagaaattaactcaaagtggatcgaagacctaaatgtaagagctaaaaactataaaacaataaaacatagggattaatttgcatggcctcatatttggcacttgattcttaaatatgacaccaaaaacaagagcaataacagaagaaaagattaattggacttcattaaaataaaaaagtttgtatttcagaggacgccatcaagaaaagacaagaaggccgggcacagtgactcacacctgttatcccagcagttcgggtggctgaggcaggaggattgcttgagcccgggagttcaagaccagcctgggtgacaaagtgagaccctgtgtctacaaaaaataattagccaggcatggtggcatgtacctgtggtcccagccacatggttatctgaggcaggaagattgcttgagcctaaggaggctgcactaagtacctcgcactccagcctgggtgacagagtgagactctgtctcaaaaaaaaggacaagaatatatttgcaaattgtatatttgataagggacttgtatctagaatacataaagaactcttggccgggcgctgtggctcatgcctgtaatcccagcactttggggggccaaggcgggtggatcacctgaggtcaggagttcgagaccagcctggccaacatggtgaaaccctgtctctactaaaatagaaaaattagccaggtgtggtgatgtgcgcctgtaatcccagctactcaggaggctgaggcaggagaattgcttcagcctgggaagtggaggttgcagtgagctgagatcacaccattggactccagcctgagggacagagactccatctccaaaaaaaaaaaaaaaaaaaaaactcttactactcaatgatarataaataacccaatttaaaatggcaaaagatctgaatagagtagacatttctctaaggaagatatacaaatgaccaacaagcacatgagagatgctcaatactatgagtcatcagggaaatacaaatcaaaaccacaatgagataccacttcacacccaccaggatggctagaatcaaagtcacataacaagmagtgttgacaaggctgtggaaaataggaacctttattaaaaagaaatccaaaaaccaaaaacagctgggcacagtggctcatgcctataatccagcacttcggacggccaaggcaggtggatcaccttagctcaggagtttgagaccagcctgggcagcatggtgaaactccatctctacaaaaacttagctgggtatggtggtgcacatctgtagtcccagctacttgagaggctgaagtgggaggatcacttgagcctgaggggcagaggttgccagtgagctgagatcacaccactgcactccaatctgtgtgacagagtgagaccccactttggaaaacagtttggcagttcctgaaacaaacatagaactaccatatgacccatcagttccactcacaagacgaaagtataggtcaacacaaaaacttatacacaaatgcttctagcagcattactgataatagccaaactgtggaaacaactcagatatttatcacctgatatatggataaacaaaacatatgtccttgcaatgaaatgttgttcggccrtaaaaagaaatgaagtattgatacatgccacaatatgcatgaaccttgagaacattatgctaaatgaaagaagccggtcatgaaagaccacatattatatgattggatttatgtgaactgtctgaaatagtcagataaatagagacagttcagtggttgcttagggcttagggaagtagggaggtagttgwgcatagctagaatacaggatttcttttgaggtgatgaaaatgttataaaattgactatggtgatagttgcatatatctatgaatatgctaaactccattaaattatatagtttaagggggtaaattgtaaattacatgtaattatattgtaaattatatagcgccaccacacctggctaatttttttttatttttttattttttgtagagacggggttttgccatattgcccaggctggtctggacctcctgagctcwggcagtccacccaccagggcctcccaaattactgggattaaaggtgtgcataaccacccctggcccaaagacaaatatcttaaaagcaaatagagacaagacacaaatcaccttaagacaatgataattggagattttcttaccagccatgatagagcctggaaggcaatggaataatctgttgagaattctgagggagatgactgtcaccctagttaacctgtctttccagaacaagggtaaaacaaaatgaatgtgtaagcatctccttgaagattagggaaagaagatcctgsgaagtttctagcaagcagagactggtaaatgagaatcgacagtacaggacccattccagctattttcttaggtgtaatacactgatactatccttatrtaatgtgttgtgtgtatgtgtaagaaaataaaatccaaaaagataacagtattaggggttttttttgttttttttttttgtttttttgtgatggagtcttgctctgtcacccacgctggagtgcagtggcgcaatcttggctcacttcaagctctgcctcccgggttcatgccattctcccgcctcagcctcccgagtagctgggactacaggcgtccgccaccacgcccggctaattttttgtattttcagtagagatggggtttcactgtgttagccaggttggtctccatctcctgacctggtggtccgcccacctcggcctcccagagtgctggaattacaggtgtgagccaccgtgcccggccaacagtattaggtttattgacacgtgacctctgctctaaaaccagttttccaagtaagttccataattctctggctgtgtagcttcctgcggcagaggttttctggaaccagctttgttaactgaagaagtactgaggctcttagctgcgtcttcctgggccttggtatactcttctatatagtggggatttgacttctccaagctgttgtgagagctatgagataacgtgtgcctttccctttcctgtctgttttttacttttaagttacttggaatcgggcctccatattatttgcagggtgataagccaatttaaagggaatctctgttcgtgcccttagttagtgtttgctgtccagcattccagcatggtgcatatggagttcgtgtttcccttcaagaggccttttgtaagatcttgcctcgtgaattacagcaagcatcttgtctcctttttcctttgggtttcctcttctagcaatgtacaatgcctgccgggatgtggaggccccctcaagtaatgacaaggccctgggactcctgkrtgggaaggacgctgacgcctgtaatgccaccaactggattgaatacatgttcaataaggacaatggacaggcaccttttaccatcactcctgtgttttmaggtaggtataaagattccaagtttggtgtgtttatgatattgttttaaagccaaggaactggctgggcacagtggctcaccagtgcttggggagactgaggcaagagaattgcttaagaccaggagttccagaccagcctgggcaatgtagtgaggccccatctctatgaaagaattaaacattagccaggtgtggtggcatgcatctgtagtcccagctacttgggaggctgaggcaggaggattgcgtgggtccaggagttcaaggctgcagtgagttacgatcatcccattgtactccaaccttggtgagggcaaagccctgtctctccatgaatgaatgaatgaatcttagttgaggaagcataatctacaataggaagataaacacattcaggtaactagttcatagtttctcccagtaagagaggtaactggtacatttatcctgctgtggctaatttagggggtgctgggagtgggaatggaggagsaaatgaattgccttcaggcattgctgtcataattgaaagaataagcagttaaaaagggggtgggaggcagcttttctagagctctgctatagtattagctcctgagaatggagatgggacatgattgaagggttgccttggtatgtggtgtacttggaggattcctctatcagtgacaaacccctacgcgcaagtttattgaggtaacttaaaattccataggacgaagcagcaaaacataatttaattaaactaaaacctccaattctttttcttctttcagttgttttatgtatttcagtgggcttttctttgagtttaagtataatacaaaattttggatgtttttaattgagatttgtactcaacacaattcctttctgtagattttccagtccrtgggatggagcccatgaacaatgccaccaaaggctgtgacgagtctgkggatgaggtcacagcaycatgtagctgccaasactgctctattgtctgtggccccaagccccagcccccacctcctcctgctccctggacgatccttggcttggacgccatgtatgtcatcakgtggatcacctacatggcgtttttgcttgtgttttttggagcattttttgcagtgtggtgctacaggtaagcagttttgtttgtcatccagggcaaaaagagsaaaattgcccactggcactttgagctttcatttgtcagagcttggttacttaggacaagaaacaaatacctccatgaataccattgcatggattattgtgtcctacagctattctatagtaaaccatcaaagttctgtttaacactgcaacatctgaaatgaattttactgatttattcaaaatgatgtgtgatttaaagcactgtgcattagccactgattctttttttttttggagactgagtctcactcttgtcgcccaggctgaagtgcagtggtgtgatctcagctcactgcaacctccacctcccaggtttaagcaattcccctgcatcagcctcctgagtagctgggattacaggcatccgccaccatgcctgcatgcctgactaatttttgtatttttagtagagacggggtttcaccgtgttggccaggctgatctccaactcctgacctcaggtgatctgmccgccttggcctcccagagtgctgggattacaggagtaagccaccgtgcccagccggccactcattctttagaaagtcagagtcaaggccaggctcagtggctcacacctgtaatcccagcactttaggaggccaaggcaggagaatcatgaggtcaggagtccattgcaaacagccctggcgacagtgcgagactgtgtctcaccaaaaaaaaaaaaaaaaaaaaaaaagtcagagtcaaatgagcgaaatcagattcaaatctaattaaatggagtactatagtccttttagatatttgcatcttaatttaggacagtactttttttactttttattttgaaataattgtagacttaaccaaaaagttgcaaaatggtagaatttatgtgtatccttaacccagtttccccgatgatacaacttacataactcatagtacatctagaactagaaataccatttgacccakccatcccattactgggtatatacccaaaggattataaatcatgctgctataaagacacatgcacacgtatgtttatagcggcactattcacaatagyaaagacttggaaccaacctaaatgtccaacaacgatagactggattaagaaaatgtggcacatacacaccatggaatactctgcagccataaaaaatgatgagttcatgtcctttgtagggacttggatgaaactggaaaccatcattctcagcaaaatatcgcaaggacaaaaaaccaaacaccgcatgttctcactcataggtgggaattgaacaatgagaacacatggacacaggaaggggaacgtcacrcaccggggactgttgtggggtgggggcctgggggagggatagcattaggagatatacctaatgctaaatgacgagttaatgggtacaacacatcaacatggcacacgtacacatacgtaacaaacctgcacgttgtgcacatgcaccctaaaacttaaagtataataataattaaaaaaaaaactcatagtacaatgatcaaaaccacgaccatgccattattattacattattattagctaaaccagagatcttaatcagatttcaccagctttttctctaatgcccttccctgtttcaaggycccatattacatttttgtgttttatgagtcccctctaatctgtgacagaaagttcctcagtctttccttttctggccttaacactcttgatgatactggtcaggtattttgtagcatgtccttccatttggctttatctggtattttctcatgatgagattgaaataaggtgttttgacaagtacatcacagaagycatgttatgtctttctcggtgcatcatgtcagggatccctgatgttgatgcgtctctttcctggtgatgttaaccttgatcacttgctcaaggtgatgtctgctggctatctccactgtgaagttactgcttttcccttcgtaattgataaatatcttgggggaagatgctttgagactatactaatattttgttcctcctgaaactcaaccactgattttagcattcattgttgggtcttgtctgcaacmgttataactaaggtgtttgcctgatagtgattttyttctctttccctctcttcctctgcatttactaacyggacttctgtacagaaagctatcccttctccctcatttatttactcagttatttacatcatggacttttaattctgtgggttgtatccaacactgtcatttatcttgttactcaaagttttccactttgggccattgggagtgccttctggctggcttctgtgttcttacatacacctcccatccccagctttatcttacatattccctgtccctgccctgcaaggagctctggttccttttattggagaatggtatgtagaaacgaagatctgggcactaggtaygctcattgctgctggaaagagtagcatgtttttgtttgtttgtttgtttttttgagatggagtcttgctctgtcaccaggctggaatgcagtggcgcgatctcagctcactgcaaccaccgcctccctggttcaagcagttctcctgcctcagcctcccaaggcacgtgccaccacacccagctaacctttttgtatttttagtagagacagggtttcaccatgttggccaggttggtctcgatctcttgacctcgtgatcccgcccaccttggcctcccaaagtgctgggtttacaggcgtgagccaccgcgccyagcccagtagtgtgtttttaaaggacctaaaagttttaaataaaatgagggccacaaggtgaaattatcctttattaattgttctcttaacatcttcttaaattttctcctgagactggtgagcagagggacccagagcaaggggacttaggggaaagaaggcagtaattagggaggaggaggccaggaggaggaagaaagcatttcatgggattacaggaatgtcccaaaaacaacctcactgtgatgaagtccactaatgctatttcttcacttctgtttttcagaaaacggtattttgtctccgagtacactcccatcgatagcaatatagctttttctgttaatgcaagtgacaaaggtaggcatatttgtccatgaataaaagggttcagatgatgctgtctgtcatgagagcattcgtttcctcagtggggttgcagcagtgggtgaggtggtgtgccagtgccgaggacacggctgcgaccaaggcagacatggtccttgcctttgtggcccyaccatctagtcagggtggcacagcagaaccaagtaattaatcatagctggggaggcgcgaaagcagcaggacaagagtgggaatagcagggcagggttgaacctcacccttcagaggctcctgtgtcggcatctcctctgtggggtgggaatagcgctcattgagggcagccaacaaaggtggcttygctgagcagataggtagctgagggcaggggtctcatatgtgtccccaggtgggcttgattcctgccatgagatagcaactaatgctttccctgttcygactttcaggaacggcttggctcttaacctccaccttcccttcctctcccgttcttccaggagaggcgtcytgctgtgaccctgtcagcgcagcatttgagggctgcttgaggcggctgttcacacgctgggggtctttctgcgtccgaaaccctggctgtgtcattttcttctcrctggtcttcattactgcgtgttcgtcaggcctggtgtttgtccgggtcacaaccaatccagytgacctctggtcagcccccagcagccaggctcgcctggaaaaagagtactttgaccagcactttgggcctttcttccrgacggagcagctcatcatccgggcccctctcactgacaaacacatttaccagccatacccttcgggagctgatgtaccctttggacctycgcttgacatacagatactgcaccaggtaacctgctgtttgaagaaataagtcactctagatgaccttgtggtttgctggcttttacatgttkactactgctagatggggatttggggctgaatgtcatggtatatcttgaaaatcttagcgtataatggcaaagctgcctttaagttaggtttcaagaaagtgaatgatgttgaacttaatggaatatttattgttgctcacttttgtatttacttcagatagtagaccttgcctttttcttgaaattgagatgagcagagaaagaagacttcagtggcgtttctctattgaggcaggatatatttattaggaagtcaccttaggaatttgtgaaatgttttctgttggtaactgaaagtaatatgcaaggacccagaggcatgaagcccttactgctgtcctgggggctgaggaaggagctgccagattaccatccctgatccaacctgtaggaatgaacttatcactcactgcctgaacatgggcacccagcctgtttttggtgagaggcgcatttggggcaagatccatcccattgctcctagaaaggcatgtaaaccttcccattgtccctgtcacacttgccttggagaactgtacctgtgcataaactgtaccggcttcttttttaatgaatgtataatcacatggtttttcctttaaacattgctcatgtctacaagaaagtctgcaatcttgaaaagcattaaaatggtcccaagacttgaatcttttctctacccagtgactgtctgttgctttttccagcttgttgctgaaggtgaacagcatagtcatttacctccaagatcatcttctctgttaggaaataaggggacatatataaatggctgtagtgcagagcaaggcaggaggttatgtgttactattgagaggagggtcagggagaccaggagtccccctccactctcccctctggcctgctggccaccactggagaacggtggaggggagatggttgtgtgtcctatgttgatagctgttctggtcatggtgttccccctacccctcgccgcctctgtggacgcctctaactagtttgctgttagagtgggcctgtggcctgaccagttttcttactgtattgcatcttaattctctccctcatcttaggaagtattttccccaaatactctttgtcttctgaccctcagggcaatgctgattaatcaagatctgagagaaatgtgacgtgtttctgggtttgcttatttttaaaatcttctttcaggttcttgacttacaaatagccatcgaaaacattactgcctcttatgacaatgagactgtgacacttcaagacatctgcttggcccctcttycaccgtataacacgaactgcaccattttgagtgtgttaaattacttccagaacagccattccgtgctggaccacaagaaaggggacgacttctttgtgtatgccgattaccacacgcrctttctgtactgcgtayggtaagtggcaagagacaatcattggtagacaccattcttgggtctgacttagggtacatgggcaaaagcttgttttatgagcataacccagaggtgagcaaacaacaagaccttgccctgtgaagtttacatcatctttttttttttttttgagacagggtctcgctctgtcgcccaggctggagtgcagtggcgcaatcttggctcactgtaacctccggctcccaagttcaagcgattctcatacctcagcctcctgagtagctaggactacaggtgtgtgccaccacgcccagctaatttttgtattttcagtagagatggggtttcgccatgttggccaggctggtctcaatctcctgacctcaggcgatccgcccacctcggcctcccaaagtgctgggattacaggcgtgagcttccatgcccagctggaagcttacatcttaatggagggagacggttgatgaacacataacatrtgctatcgtgccagctagagattagtgctatgaggagaaaaataaggctggacagagtggggggtgcattgcttaagcgtgragatgtgcacaaagggagaggaaaggacagctgggcacatcacagggatgagagttcccggcagaaccagcagcaagtgcagagccctggcaggaagctctcgtggtgtgtgattgaggagtgcagctgcctctcaccctttacctcgtgcctgggtcgctaacacagtgtcatgtatcacaccccccacaagatttaaagatagaagagcctttggtgycttttgttctgtctcagatatatagcccagtcccctgtagtgccccagctatttgggaggcagcctccctctgaggagttgaggcagtataggtctgcagctccgcagctttagattggagggccctgcagctgcttcccttaggaggcatgtctagctgggcagggtgcgtttataattgggaatagtcaccccaggaagcggtgctttggtgacctgtaggggaatcttaaggcttctcccagtaggggaagagtagcatgatgccggatgggcctactctccctgaatgctagggacctggcctagggacatttgttcagccagttgagcaaccacagtggctatttcttcagcatgggaacagagaaattattcctttttgccyttaaggacactgctcagccgactacttctcaagagctaaggactctcacttctggttctaaagaactttgaccttgagttctgtttgtttgttactggagtaagactttttatgcagttgggctatatttactctgtttcaagaatatcacccctaaaaacatgagttatactcatgaaaacacaatagcttatgctccataccctaaaccggcattctccacagggtagacggtgcagacgagccatgggtaatttgaagaaacaaaaaacatttaatgttacataatttttataattggacaaccatttaatgttacataaattttatagtttactctctgtggcacaagataaaagtcaacaaaaatgatgggggacagaggtgcgtgagccttgtgtttcctcaaagcggacgtggttcccaccagtgtggaagcggtacagggagtggcaggctcctggyggcagggacctgaattggtttgtagttatgcttgtgcgcgtcctcataaccccagtctcgccctagcgctgtcccctttcctctccctccagcttttcctggactttttcacctgagggtcctgcagtaatggcaggtggcctgcccagaaccatgcccttacctgctkcttctccccattttgtttaaaggcagtgacagctaccagttactcaggcttgaggctttatccctgaattctgcctcgccctcgccttcctcatggggttcttacgggtctgagcctctggatgctctctcagatttctgctgtggatgaagggactcagctgctcgctgcaggtcacctgacctccctcatgccgtcacccatccactctgacgggtgggtcatatgcagaagcttctcagcacctggccaagttgtagctgatggtctgtccgaaaatgctggttcactctccactggccaactgtctgtctgcactgcactgccagttgcctcttgcctgsgccattgcgctaacatctccacttactgttccacctgcttcctgtttctttgccgtttccagaccttccactttgccacgcaagctatctttgtaaaacagctcatgacatttctttcccggaaatctctaattgttccccagtgcctccagaataaaaatccaaactacttaactggcactgagtccttttattttgcatttgtctgtccattactcttcccagactggccccctccttcaggagcccccttggtgggcaccccatgctctaggacaggacatcttttcyttgaattattattattttttttttagagatgggatcttgctatgttgtccaggctggactcaaactcctgggttatagccatccttctgcctcagcttcctgagtacttgagattaggygtgccaccataccyggcatacaggacttgccaaaccaccatcttgctctcattccctctcactgttctctctccctccctttttcctcccacagttgtaattgtgtgagacacccttttgtcctccctctttggtgaaatccccctcatcctcggagctctgggtctgtacagtctcttcctcttggctataattttgccttttagtgtttgctccctcctctgtgcctgcrtagcgccatgcaccatgtgccattgatggcactgggctgtatttgcctgcctcttgcccagtgattctgagctcccaaaggtgagtgctgagctgtattactcaactgagaaacctcagggcccatgttgtccttagaatacagccagcctcatcaaatgttcactgtgtaaatgtttaggtccctgatgtcttgaggcccttctaactgggaggtgttttctaaactttttggcagggctcctgcctctctgaatgatacaagtttgctccatgacccttgtctgggtacgtttggtggaccagtgttcccgtggcttgtgttgggaggctatgatggtaagtaagagaagctttgacttttccttttagataaagtcatctcggttttgtcatyagcatcaagtggtaattatgaagatttcataaattgggcagttttgttaatttcttacctcttgaatcccagaatagtatctcctttggctttgggtttgggtttcattccagatttaaaagaagtggattgggttagccatttttaggtcacacatgcctttgagaagctgtcgaaggctaagtacctttycccagaataatgcaattgcaaacctctgcattgttgttcagcttgaaggtcatgggcctccgaagttcatttatagaccctctagggagctcatggacctcaggtaagagcctctgtgatagagaaaagatagtatgtgaggtatgtggaaaaagaaacaaagttgatggattttttttcttctaagccagtcagttgagtatttggacactcttacagtgtgaagagcagctggtttgctctttcctggttcctgtagcactttagaaccaattgtacttgacaaaatgaggtgattattcatgtgacacctttggcatcttaagccaaattacaggctcaacaggttttgcccaaccagttaagaatccagataggttttcttctcctcacttggtggcaggggagaagttgcaatctgtatttaaaatttactgtgcatcagagaggaaaatgccatttctaattgttggagaagggatggtgtcagcaactgactagccataggggaaacaattgactttgatctctgacttgttcatttcaccaaaataaattccagatggataaaagattgaaatgtaagaactgggccaggcgtggtggctcacgcctgtaatcccagcactttcggaggccgaggcgggtggatcacaaggtcaggagatcgagaccatcctggctaacacagtgaaaccctatctctactaaaaatattctttaaaaaattagctgggtgtggtggcaggtgcctgtggtcccagctactcgggaggctgaggcaggagagtggtgtgaacccgggaggcagagcttgcagtgagccaagatcaagtcactgcactccagcctgggcgacagagtgagactccatctcaaaaaaaaaaaagaaatgtaagaactggaagaaaattcaggaggcatttttaaaaataatttttaagtggaaaagatatttctaagcaagacacaaaactcagaagcccgaaaaggaaagactgatgaagttgagtacatgttcatttgtggagaacaaacatacagttaaaaaaacaaaactgggccgagagttattcatgcctgtaatcccagcaatttgggaggcagaggcgagcacatyacttgagctaggagtttgagaccagcctgagcaacatggagaaaccccgtctctgcaaaaaatacaaaaattagctgggcatggtggtgcatgcttgtagtcccagctactcgggaggctgaggtgggaggatcacttgagcccaggaggttgaggctgcagtaagcgagattgcaccacattccagcctgggtgacagagcgagaccttgccagaaaaaaaaaaaaactggacaaaaatattagtatgcatggcagtcagcattttcttaataaataaagatctcatctcagcctggccaaaatgtgaaaccctgtctctactgaaaatacaaaaaawattagccacacgtggtggtgtgtgcctgtagtcccagctactcgggagactgaggcaggagaatcacttgaatcctggaggtggagtttgcagtgagccaagatcattccattgcactccagcctgggcgacaagagcaagactccgtcttaaaaaaaaaaaaaaaaagttgtgaaaaaaagatcaacaacctgaaagaaaagtgggtgaggtcatgtgaaagataacaaaagaagaaatacaaaaaaaaaaggtttttattttatttttcagagacagagtcttgctctgttgtccaggctggagtgcggtggtgtgatctcggctcactgcaacccctgcctcccaggttcgagcaattcttctgcctccacctcctgagtagctgggattacaggcatgtatcaccaggcccagctaatttcttgtatttttagtagagacacggttttgccttgttgcccagactggtcttgaactcctgacctaaggtgatccacccaccttggcctcccaaagtgctgggatcataggcatgagccaccacgcccagcctcagtaaatattttcttgactaaagtaatgaaaagggaggccaaggcaggaggattgcttgagcctgagaagtcaaggcttcagtaaaccatgattgtgccactgcactccagccagggcaacagagtgagatcctgtctctaaaaaagaagaaaaaaaggaatgaaaaatagttaagcttctttggaaggcagtttgggagaatttatcaaaattggaaatatacatagtttttgattcattgattatgctttaagaattgattctagccaggtgcagtggctcatgcctataatcccagcactttgggagggcaaagcaggaggattgcttgagcccagtagttcaagtccagcctgggcaacatgacaaaatcccatctctacataaatacaaaaattagccagcaatggtggtgcacacctttagtcccagctactgggaggctgaggcaggaggattaattgagttcgggtggtcaaggccacaaaaagccgcgattgcaccactgtacttcagcctgggcaacagaacaagacactgtccccctgtcaggcccccaccccaaaaaaagaaaaaagatttatttctacaagtatgtgttttacacattaaaatatttataggctatttatagtaactttgtaatagaaaaaattgcaaaactactcatcagttgggggggattggctaaagtataccagaaaatactgtaggaaaagaataaggaaactctttatggagcagtctccaagatacaaaattttaaaatgtaatgtgcagaatagtattttactgtttgtgtggttaagagggaaaggggaagaatctgtgtgtttgcttgtgtgtgtgyggagtggctctggaaagattcgcagatggtcacagtatggggaggagaactaagacaatgaaacagatgttggagaaggagagaattttcgataaacacttttctgttctgtttgaaattgttaacatgcatgtactgtatcctttaaaaaaaaaaaaaaaaagagttactcttcctgaatgataaccatgcctacctcagataaaaaatcctttttattcattaactgaagtacataaagactatttcagcaaactcttgtttaattcttagagcccagagatacagtccatagctccagtgagaaatctgtgttgtgatttttcccctggtatgtgtctaattttctgcatgcttgtaatctgctttttgatgtcacatttttcctttctagatcaaaactacaataacgccactgcccttgtgattaccttccctgtcaataattactataatgatacagagaagctccagagggcccaggcctgggaaaaagagtgagtcactcatgggtgtgagcagactgtccttgcattgtgggaagctagacacttgcrgcaagcacttaaacttcattttctaaattaaccaatggcagatctgagttacgtagttttgttcacttggtactaatgatgctaagaagaaactgtaaacacatttacctttgagcaggtgctttaaacagctctccctccacaggaatgcaaaagtgtgcaaaaaaaggttccttgcattgtttttacttatttcatttattttttgagactgggttcacttttgcccaggctggggtgcagtgactgaatctcagctcactgcagcctcaacctcctaggctcaagtgatcctcccacctcagcctcctgagtagctgagactacacgtgcatgccatcacacccagctaatttttgtatttgtttgtagaaacagggttttgccatggtgcccaggctggtcttgacctactaacctcaggtgattcaccctcctcggcctcccaaagtgccgggattacaggtgtgagccactgcacccagccacctgcattgttttctaacagcaaaacttgggagcatgctgaatgtatttaataaggaatgaatacaatagaatattgtgctgtcataaaagacagtgaagtaaatggtccatgatgtatatttgtataaatatatattgtttatgctgctgtccatgcttagaaaaaaatatcaagcaaatgacctcagaaattaactgtgtttgtgacctctagagaatgggaagagaggacttaggaggccaggttgcactttatgccctccagtacttttaaaaaattgttttactgagatatggtatatgtatcatgcagttcacccacttaaagtatacagttcaggctgggaatggtggttcacacttgtagtcccagcactttgggaggcccagacgagaggctcacttgaggccgggagttcaagaccagcctaggcaatgtttgcatgtctctaaaaaaaagaaaaaagaraatttaaaaagaaaaaaaagcgtacaattcagtagctttactatattcacgtgtatgtgcagccatcaccacagtcaattttaggaacattttcattactccacaataaaactctgtaccctttaactaacaccctccatcttttcatcctcctatccacagccctaggcaaccactaaaatactgtctctggagattttcctattctggacttttatgtgcatagaataatatgtggacttttttgtctggctatcattgaacataatattctcaaggttcattcatgttgtggcatgtatcagtactccattccttttcattccattgtatggatataccacattgtgtgcatttatcaactgacaaacacttgggctgtttccattttggctattatgaataatgctgctatgaacacttgagtacaagttcttgtggatgtgagttttcatttcttttgggtacatacctagtagtagaattgctgagtcatagggtaagtccaccttgaatagtttgaagaactgccagactgttttccaaagtggctatagcgctttacgtcaccaccagcagtccatgaaacttccaattcgttcgcatcctcgtcagcactttttattatctgactttgtgattctagctatcttcatgggtgtgaagtggtatctcattgtggttttgatttagtagactgaatgcatttcttttttttttttttttttttttttttttgagacagagtcttgctgtgtcatccaggctggagtgcagtggcatgatctcagctcgctgcagcctctgccttccaggttcaagtgattctcgtgcctcagcctcccaagtagctgggattacaggcacctkccaccacgcctggctaatttttgtatttttagtagagacgggctttcaccatgttggccaggctagtctcgaactcttgacctcaggtgatctgccagcctcagcctcccaaagtgctggaattacaggcataagccaytgagcccagccctaaacttactttaattcagcatgtatggaaccttagctgtaatctgatagtctccagtgtggaagaccctaatgcagtggctgggcatggtgcctgtcatcccagcacttagggatgtggaggcaggaggaatgccttgaggccaggagtttgagaccagcttgcacaacatggcaaagaccccatctctacaaaaaatttttaaaattagccaggcatggggatacgtctctgtagtaccagctactcaagaggctaaggcaggaggatcccttaagctgaggagttcgaggctgcagtgagctgtaatagtgccactgtactccagccgaggcaacagagagagactctatttcaaaacaggaacaaaagcaaacaaaggatcctaatgcaggataaaggttaagaaaacatggcctttgagccgggcacagtggctcacgcctgtaatcccagcgctttggggaggctgaggcaggtggatcacttgaggtcaggagtttgagactagcctggccaacatggtgaaaccctgtctctactaaaaataccaaaattagccgggcctggtggcgcacgcctggagtcccagctactcaggaggctggggcaggagaagcactcaaacccgggaggtggagcttggagtgagctgagattgcgccattgcacttcagcctgggcgacagagcgagaatcagtctcaaaaccaaaaaaaagaaaacgtggcctttgtatcgtgaaagttagggagaagtttcttacttagctgtcagttagtttaactaaaaatataacattttgcttaccttttaggtttattaattttgtgaaaaactacaagaatcccaatctgaccatttccttcactgytgaaygaagtattgaagatgaactaaatcgtgaaagtgacagtgatgtcttcaccgttgtaattagctatgccatcakgtttctatatatttccctagccttggggcacatsaaaagctgtcgcaggcttctggtaagccggggggggggtggtgtatgttctagaggttaacagcagtgcacagtgtaacgtcatatttttgcctctttattcttattccatyatgtttaaaactgccataaattcccccatgttktaattgtatgtaacgtttctgttgcctacatctattttcttcattccaactttttgktttatcttaaagtttatttcacataatccagttttttcttatttgtccagtccatcacctaagaatgcaaactcataacatgtgttgccsgagcagacctagaaatgtttacaagtcctctctgaaacacagaattgtacattcaactctaggtttaatacagccctgtaaagtaaaaaggaggaccttttagtaacaagtgggacagacaaccctgtaactaattggtgattgtgtctgtcgcctctctcaggtggattcgaaggtctcactaggcatcgcgggcatcttgatcgtgctgagctcggtggcttgstccttgggtgtcttcagctacattgggttgcccttgaccctcattgtgattgaagtcatcccgttcctggtgctggctgttggagtggacaayatctycattctggtgcaggcctaccaggtatacttccatattctcacagggctcagcatctgttcaagtttcagggactgtgaatggctcctgggctccgcattcgtgagtgtgacctgtgagggtgttttgtttcctttccctgtgtggctcatcggtcgtcttgacttgctgtggacatcttaggaccaagaatttcacccctctttttggttgttgaaatagtagatataaagtaagaattgtgttttaaattgtatctttaaatagtgtcttttaatagtatcttttcattttaaatagtatcatgtgtacaagaagggctaacacacttttggaaaagattttgggtacgactgctgttaaaatgatgttcagcatagtatagaatgttagattcattttgcccaaaggtgccactaaaaaggcaaaaggtcaacacgtgtcccgctgctgtagaaggtggtctcagtcgtcctgtagacccgacgtgggyggagactcagtgcacgtgagagtgatgttcactggtccagtcccctgccgcctgtgttccgagtgttttcctgataatgtggctggctcagctttccctttagtttctcacttggtacctagctctgtagtgcagaaatactctgagaacattggagtcccccaccgaagtttatatgcttagaagacactgctaatcgtctactaatcatttatttttacccttgagttaacacaaggcagcaagaaatggcgttgttattgagaaattttaatgtcgcataatttttttttttttttttaagagagatgaacgtcttcaaggggaaaccctggatcagcagcygggcagggtcctaggagaagtggctcccagtatgttcctgtcatccttttctgagactgtagcatttttyttaggtaattatgctttcaatcctaccagtcctgtagtctgctgagcctggagaaagaaggagctggctacctgaacatgtccctttgtgttgcttcctttttttttttttcttttttttttttttctctgagacggagtctcactctgccacccaggctggagtgcagtggtgcaatctcggctcactgcagcctccgcctcccgggttcaagcgattttcctgcctcagcctcccaaatagctgggattaaaggcacgtaccaccatgcccagttaattttttgcatttttaatagagatggggtttcaccatgttggccaggctggtctcgaactcctgacctcaggtgatgtacctgcctcggcctcccaaagtgctgagattacaggcgtgagcccccgtgcccagcccgtgttgtctcctttttttaagctttgttctgcactgggaaagtatcactggaccacagaaaaattggcagcagtaacttaggtgtgattttgcaagtggcttccttctcatttaactgtcaggacagcattgatgttggggttcagggtgaaagagacctagagttcgtcttgccactttccccttttagtagccactgggaatgttgatagttgaaaatggcatccttgagtagccactgaatccttctccacatgacactctaagcagcagctcccaaatccacaggcactcgcttacaaratgtttgccgttgttttcaaaggcagtctttctcttctgtgcacacaactcattggggaagcagccttgttaatgaccagaagctcttgactcaccacattacaaggagccagaataagctggaacaaagtcagcacttctgtgtttctttcacatagagaatcatcaaatagacccactagtggggckgtctgccccatgtctgaagtgtagtaagagcaaagtgactctgtccactataggggaggctggactggaatcactcagtccaaagaagaccatccacgggccacaaactgcaatgcctacatggctgggaggtcagcttaatcagggccattgtaaggtcattgtaggtggtagtctttcaccacagatacactgctagcttgttattcttcatctccacaaagccatgtgcttttgaaacctgtagccctgtagttccttttgacaaacacaggtgcagaaaaaaaaaaaaaaaagaaaaaactttctttttttcactactattataagaaaaccagtgcaagtgtgatgataatagcagcagagactgtgcctcaaggttggagtgaccttgggacagtaggagtgagtagggattgtggcaccccaactgcacgtgtcctatctaaaaagacagttatgtgtgtggccaacccagtgctacaaggtctgtgttgttgttgttgtttttcttccaagcaaagctgtgaatctagatttttgtgtaaaatgccattgttaaatattggcaacttataaaaaaaagttttttaatcttaagatgggttgatacagtgtgggctaaacaggaaccatctgattcatgggctgccagtttgcagtttccaagtcttaccctcatgcctttgatcctcactcgattgtagattacctcttaactaaactgggaggctagtagtgttgatgtaataaatggaaaatactgtccatttcttacagtgaagcacagaaagtactataagaaatggcctgtattagtggttctcaaattttaatgtgtgtgaatttgctgtgaacctgagtatagtagaattggggttgaattcctgtcataactaggatggggcttcccaaatggtctggtgctgagtgtgctttgaaaagcactggcttatcacctcctgtcccacttctggtgtaatgtccagccgcagcatgccttctcatgcgtttggcctgtgctggctccttgtatctgtacatgcacatgaacataagacctgcagagagcccccggctgtaaacagaagtgacgcagagcccttctctccccgacaggagcattgtccgtgatgccagccgtgcacaccttctctctctttgcgggattggcagtcttcattgactttcttctgcmgattacctgtttcgtgagtctcttggggttagacattaaacgtcaagaggtaagttggtgccaggattatagtctatttaatttgagtctagaatctagaggaagcagctagcgggtataacctttgtttccctctgtcccctcagaaaaatcggctagacatcttttgctgtgtcagaggtgctgaagatggaacaagcgtccaggcctsagagagctgtttgtttcgcttcttcaaaaactcctrttctccacttctgctaaaggactggatgagaccaattgtggtatgcgcttatctgtggtttttctctttcctctcactgaaacagattatcacatgccttctaagaagccagacagcctgggaaggagattcttaaagctgttaaaatgtatctaaaaaaaaagcaaaagcaaatgtggaacagtagataaaatgtttttccygtgagcttttatcagtccatataaacaagagttttmagttttttattttgaaatagtttcagattcacagaaagttgcaaagaaacttttatttttcctcttaataatgaggaaatagaagccaagagaggtgaagtggtttgccccaagtcactcagcccgtaagtggcagagtcaggatttgcacccaggaatttggactcctggtgctgtggtctcacccactgccctgtactccctattagcctgtcatttaagcttttccattttaaaaaatcctgctttttgtgtgtgcttaagattttatttctggtcgtaagcttatttactaagcagtctctgtcttatgattcatttgttgttccagatagcaatatttgtgggtgttctgtcattcagcatcgcagtcctgaacaaagtagatrttggattggatcagtctctttcgatgccagatgtaagatgacttccttttttttttttttttaacttctttagctgatgatgaatacatttttcaaaacatgcacgtaggtgtttcaagcaagtgcctgcttctaactgcaaatggtgacagggtttccagggttaggagaactgtcgcagtgcactgctggtgtgggctgtctggcattctgactgagcccctctgggcacagctgcagaacacgaataactagtcttatgaggttactttatgagatgctctcctgaytgtgggkctagcaggaggagcaccctggggccctggggggaagactggtggtgttaggaatcatgagtccagctggaggcatctcagccaggaacctcctggcaccctcttattctccrtgatcctcgccttgcttagttactatcagagtgttcacactctctcctattcttttatctttctttcaggactcctacatggtggwttatttcaaatccatcagtcagtacctgcatgcgggtccrcctrtgtactttgtcctggaggaagggcacgactacacttcttccaaggggcagaacatggtgtgcggcrgcatgggctgcaacaatgattccctggtgcagcagatatttaacgcggcgcmgctggacaaytagtcagtaccaccttgtctygtacttcagaagcagcggaggaggctctcagccaggcagtcagctcaggcctgaaatgtctcactgaaaatagactttcttggaaaagttgtttttatgcaaaatgtatgttaaatctggctttaccttaaaaaacctttgaaaggactaatttaccacctaatactttgaaggcttttttcattaagtgctcatgtagtttttcttttgactgttagcagtataaaacgtagaaaaggaagttaggttttaagaaaaagtactgaaactaaagacttcctccctgtggagcaggtcagtaaccctgtctgtcctctctagtacccraataggcttcgccccctcgtcctggatcgacgattatttcractggrtgaagccacagtygtcttrctgtcgagtggacartatcactgaccagttctgcaatgcttcaggtaccttctcctttaccaaatctttccygttttgctgaaaaattttcaaattatcatttaaaaatcatttgcatcgtgcctcagtttatacctatttgtatatcaaagctgggtctccctgtgtcatcattcctttcctcagtcattcattctgaaattgtcatgttgttcctggctcagacagccaccctcggggctgcaagctgaacaaggtccacatgttcggagtgtggtttccacataaggtttctcatcctgttctaactccagcgattgcctctcaggattggtatctggccttagcttctcagaggagggcttttctttatcactttaccytgtggttttgtaggagcgtcgaggttgccctggaattttcttaataaaaacatagaagccccgggctctgaccagtcaaggccatacttgaaggaggagatctacttcagggcagaaaatgatgcatagtatgcctaagatgaaaatggtatttcagattcattaaactgtgaaagtgacatgtggctgaagcttttagataaggggaaagattatccctcactagtraggaaagtaatcgatagagaagaaagtaatrcccctcactgtcagtattttaaaatgttttacaaaaaatctggagacctattcttctaacagtcctccctgcatgtctccgccagtggttgaccctgcctgcgttygctgcaggcctctgactccggaargcaaacagaggcctcagkggggagacttcakgagattcctgcccatgttcctttcggataaccctaaccccaagtgtggcaaagggtaagtgctgctgccattgcagataagcatccactgcaactttaatttgcagtagaaaactaggagaggactgggctaagacagttgcatgggaacgtctcttctccgccccaccctgtcctggtcctttggtggaagcaggaaaaccgaaaacacctttttaagaaaatgcctcatagtgttcaactgattctgtcttagcgtgggcattcacatctcatgctctctctgtgtcctggccccctgggcatgagaatgaacgcagattcctgtgcacattccaagcggggctgagggagaggacggcctgctggtaatccaggcctgaaggaacttggcctrttcacttgtactgatggcagctggggcgtgatcttagctttagtaacattatcccacattaaggttgcgattcttttagcctcgtcatgctccttgccagcccatccatgtatagggttatgggctatctcactcccccatccagccaggcagccagttacccacggaagccagatatatggcccaaaaatagtgatgatgaccggaagtctctggccttgatttggaagctttkggaggtggaagatgagtatccccatgtatgttaggtaaaccctgaacttaggtttttcataagaacatacatctgaccagagtcatatcagtgaatcatttatatcatgcatgtgctttgagacctattcgaggtatcatgggatgactcctcctaaaagttaagtagaaatgaatcttgcagcttgatttactcactgactggatgctttggcctacgtaaaataagttgaagtagattcagtttttctgaaggcagtagccaccgttcctggggagcctccagggtgccagcgtcatgccaggcactccctgacattattccatttctcatcacgcagcctatgagtaggtggtgktatacccatttacagaagaggagactggggctcagaggtggtcattttgctcggggttacatgaccagtaagtggcagggctgaggttgttcccagggcccttgccctttcctgcttcctattacacaacaggactgagtaaaccctgtacmtttgattatacatgaaaccaggtggagaaacagcagctatgtaccaaagaacccagagcaatcgagaaaagcccatctggccaggcgaagtggctcacacctgtaatcccagtacttttggaggccgaggtgggcggatcacctgagatcacctcaggagttcaagactagccaggccaacatggcaaaaccctgtctctactaaaaaaatacaaaagttagttgagcgtggtggcaggtgcctgtaatcccagctattcgggaggctgaggcagggagaattgcttgaacccgggaggtggaggttgcagtgagccgagatcacgccactgcactccagcctgggctacagagcaagactctgtctcaaaataaaaaaaaaaagaagccagtctgggagagaacaagctaaacctttgsygttcccttatctgggggccttcttcatccctgaaatgtacagctgggtctgacctctgagtccagggtcaggtgattttgcttagcctcaagtgctcagattctgctgatattttgcaagacctggactctcttgacacccaggattctttcctcaggggacatgctgcctatagttctgcagttaacatcctccttggccatggcaccagggtcggagycaygtacttcatgacctaccacaccgtgctgcagacctctgctgactttattgacrctctgaagaaagcccgacttayagccagtaatgtcaccgaaaccatgggcattaacggcagtgcctaccgagtatttccttacaggtaaagcctgccctttttcaatggggtttacccagcaaagggcctacactgggtgggagtggggagggttcccttggcaagatgctgattttcaggttgggttctggcccctgctccattctgagcacagggcagtatatcaaaggaaatgggtgctgggcaaaggagttcagaatctaaagtctctgtgaaggcctgagggctagagacgcaaaacttgatctctgcgccactgcacagctgcaagagacacacactggaaaatggcttaaggcagggggcgcttggagagcaggcggctcagagcagggcccggcccacattcttggccaacaatgaaccagaatccctaactgctggttatttgggatgctgcctgtatgtagactttttatattgttaggggttttttttcccaggaagaaaagtattatgtatgaactactgaatttagaaactgtagaaaggtaggagaaacaagtgatttatttttcctgcctccccatgatctcgcttaaagcaggaaggcctggatttgtttggaagaagttaagagccggttagctctggcagaaaataaatgaaagcatgttttcctcaggccttgcacggaccccgctgagcctgaggtagtgtctcaggatagatcaggattctttgtttttttgtgttttttcagaatgctgtggaatgctctctgtaaatgtctataaaatagcatagattgggcttataaacagaaactttatcaaaaatatacattttgcatcactgctgggcccttctctgggtggtcagtggccatgagaggtcaagtgagttgctttcggtgagtcttgtagacagccagcaaggttttctgcaagggatgtttcccaaaggagtytgaccacttggcagtggtgacaggatgaacacgcagtgttygggagtgagagcgagctttaatgagrcctcccctctcccctccagtgtgttttatgtcttctrcgaacagtacctgaccatcattgacgacactatcttcaacctcggtgtgtccctgggcgcgatatttctggtgaccatgktcctcctgggctgtgagctctggtctgcagtcatcatgtgtgccaccatcgccatggtcttggtcaacatgtttggagttaygtrgctctggggcatcagtctgaaygctgtatccttggtcarcctggtgatggtgagtcctcatacagtctcagtttgtccctagctcctgtttcacttgggggaattggctgtcttagattccatgtaaaccctaaagatggagtaagataccaagtctggcgcttgctcttggcacacatggagaggcaggatgagtgctggaggagtgctggatggtggtgggacagggcatagagggagcgagcattgagttggacatctgggagcataggcacattacaggcaatttctgttcaattttttctcttgtcccattccttgcggctatactagtatacctgatggtgcctctgaccatggaaatgtgatttcctggcctagttctgggctagtctgcctgtaatttgttattctttagagaytgcacaagcctgtagcctgatgacagcaggatgttcactttttacttagaaaattgcaccccrccccaggagctctccgaccagtgccttttgcctcctatgtggttatcaggtacttttaatcattaaagatgagagcactrgagaaggtattcatggaaaatagaacagtgtatccgtactctcagatatgagccctgcttcagataggggagcactgaggtccaagaaaagaagttgtgacaatgcgccagctcggtgcgggtggggtgaccttaacgggttccagcaatttctcctggtcaacacaaacgtgccacagaaaaccaggcttttggctgtgtgtagagagggccccaraaagttcctggtacagtaagattggtgtgatggaggccttgtaagtccaatgggatgcttggcctcctctagcacccagggtgccctgggtaattagcacccatcctcagaacggggtggctgcctagggtcttcaacaggaagagagccatcctaaaggaagtgctttatttcagagctgtggcatctccgtggagttctgcagccacataaccagagcgttcacggtgagcrtgaaaggcagccgcgtggagcgcgcggaagaggcacttgcccacatgggcagctccgtgagtaccctgagcagggccacgccggcagagtcgcaccacaaagtaatcctcctcagtgrctgaagagtctggatcctgtacttacaaagcagcttctaaggattgcaagctttcaggcaattcatgaattagctgccacatcgtggacagaacggacgttctgtggaactgtacctgttggtacggctcctttttaggtggcagtgtgctgaagcaggaaaataacagacaagttaaacatgagacagctggcagtctttcycatttaaaatgcaggggagcccgggccagaacccagcgtgtgatgtgcggttggtgcctggagagtcgtcttggttcaactctacaccctggcttagcctatctctttaccactgtagaaaatacctggtaaagagtaaaaactaaaactttgtttcgtaacacttttaaatatttaagttttcacctgagaatataaagaaagataatcaattgggagacacgatgcagtgtctgtgcagaatacacagcttttaacttggtcatacctctcccccaggatcataaggcagcaaatagtgttaggtagtagatgatgctacctgggttcagttcccattgctttgaaccttgaatattaagaaatccccataagggctggccacggtggctcatgcctataaccccagcactttgggaggccaaggctggcggaccacttgcggccaggggttcgagaccatggccaacatggtgaaaccccatctctactaaaaacacaaaaattagccaggcatggtggcgtgcacctgtttaatcccagctactcaggaggctggggcaggagaatcacttgaacctgggagaaatcctygtaaggaagtgtttttgttcaattacaggttggtaaaagtggtttctaacacagtatctcttcttttaggtgttcagtggaatcacacttacaaaatttggagggattgtggtgttggcttttgccaaatctcaaattttccagatattctacttcaggatgtatttggccatggtcttactgggagccactcacggattaatatttctccctgtcttactcagttacataggtaagagttctcatcttaaaagggtggcacaatrgaaggacattactgaaagggaattctatcctgaggcattcttttcaagtatttgaactcatactaatggtcatttgataatgataaatgatactgagtaaaaaaatttcttctaaaagaaaaaacccatccaggggattcatgatggtgcagactactttattaggaagttgtcgatgttttttctggaggcctgatctgtctgcttcacaaaggcctggagccagtccttgaatggatctgagtgtcagcaggcagggcagctcctccctgccactgagatgaaggagtccatctggcagccagctctcacaccagcagtgctgcagaacagctttttatgtccctcatggatttcccgtttcttagcaaagtgcttgctgcctttcttcatctcgagactgtccttgatccttttacttctatggccacttcaccttgcacaaaaatgacccacggttgaaagarcaatactgatttgcttcatttatagctttgtcactaaattgaagcactgaagtagaagattaagaaaatgaggggctttttatcatctccgggggatagaaagtagttctattacaatctaatatactagttccttttaagaaaaaaaaaaaaaaaaaagagatgagcactttggaaggctgagacaggagaatcgtttgagaccagcctaggcaacatagtgaggcctccatctctacaaaaataaaattagccaggtgaagtggtgtgcgtctgcagtcccacctacttgttaggctgaggcaggaagcttgcttgagcccagaagggtgggcttaggatgcagtgagtcgtgttcataccactgcactgcagcctgaggaagaaagcaaagagcccatctccaaaagagagggagagagatgtggtctcactctgttgtccaggctggtctcaagcaattctcctgcctcagtcttccaaagtgggattacaggcgtgagccactatgcccagccaactagctccctttctcctgcagaaataagaaaaagtctctctctctcatagggccatcagtaaataaagccaaaagttgtgccactgaagagcratacaaaggaacagagcgcgaacggcttctaaatttctagccctctcgcagggcatcctgactgaactgtgtctaagggtcggtcggtttaccactggacgggtgctgcatcggcaaggccaagttgaacaccggatggtgccaaccatcggttgtttggcagcagctttgaacgtagcgcctgtgaactcaggaatgcacagytgacttgggaagcagtattactagatctggaggcaaccacaggacactaaacttctcccagcctcttcaggaaagaaacctcattctttggcaagcaggaggtgacactagatggctgtgaatgtgatccgctcactgacactctgtaaaggccaatcaatgcactgtctgtctctccttttaggagtaagccatcccacaagttctataccatatttttagtgacagttgaggttgtagatacactttataacattttatagtttaaagagctttattaatgcaataaattaactttgtacacatttttatataaaaaaacagcaagtgatttcagaatgttgtaggcctcattagagcttggtctccaaaaatctgtttgaaaaaagcaacatgttcttcacagtgttcccctagaaaggaagagatttaattgccagttagatgtggcatgaaatgagggacaaagaaagcatctcgtaggtgtgtctactgggttttaacttatttttctttaataaaatacattgttttcctaagttttggggttaccctatctgctttgagagacaaatacaaaagctaaatggaagagattctatctaacctgtccttatggtaactaaatgccgtcttacattgagctagaaatagacctagaagtttcattagacagccctgatccttccctatcctaaagatgatgtcttaggttgtataactatttggagatgagaatgatcaaccagggccaggtgcggtggctcaaacctgtaatcccagcactttgggaggctgaggcaggcggatcatgaggtcaggagtttgagaccagcctggacaatatagtaaaaccccatctctactaaaaatacaaaaatcagccgggtgtggtggcacgcacctgtagtcccaactactcaggaggctgaggcagaagaatcgcttgaacccagcggaggttgcagtgaaccgagatcacaccactgcactccagcctgggcaacggagcgagactctgtctcaaaaaaaaaatgagaatgatcaaccaatgtatacttcataaaactgaaaccttaataagccccagaccctttaaaacccttagccaccatttgccgtcttattcctggctttaagagatattccaagatctgctataagagatgggctgtgcctgatctgggtcctaaatgtgtcttgactcaaaacacacctcctcggtgagttccagagcataattcagattctgtcagtatactgaattcactctactacaaataatgggccaagggctaggtgggctgttatcaaattgtgttgtttacaaaaatgctaacccagggtcctcgcccaccagctgccagtgccctctgctactctttgaggctatggttaccccaagtcttttcattgcattctcacctggtgtgaaattggggctccctcgcaaacgctggtttcgctgttcaaaaaagcggaatattgtatagaaaagcatgttgtcttcagtctgctttgcagcatctaaaaattttcgtgcagaaatgttgtcatggccaccaatgccccggataaaccttaaggcagctaacacttggtgtttggaaaggagaacttctactatttcatcatttgctgttgaaagtcgctagcagtaagggagagaagtccaggtcagtgcaaacaacaggaacagagttagtttccatagtctaaaacctcacacatcagagttaccttcagcatgtccagagatagctgatgagcaggaggatagaaactctctagggataacagcagacaagcctgaaagacatttttagacccacttcagttggaaagataacggttaaaattttccatttttaaccacaatggaagtaaaaatctggcaatgcataccaaaggtttggagtcgctgaggacgtggtactgcaggaactgatgcagcatataaaagaggttgtgctggacaagggttttgataacaagttcatgtagrtaatgctgaggacaaaagtaaaaagtgaaagaacacttccaaatcattcagctacaacagactagaggctccccaaggactggctattctaaccaacacagtaaaagtctgtcattacaagaagtggtttcgtcatgcaggtaaagaccccaacttgaccttacacttcccattccaactaataatgtcaggagtcactcagcattctgagtcagggaggcagacctgtcttagcatatgagtcatcttctaagacagtgactgtgttttttttttaaattccttctgttttaacttgggcccagatgatttgaaggtacctgtactgcaatctgaaactggttaagagaacgaatgtattccatcagcacggctatcacaaatttatgaggcatctcctagggagaaaaaaatgtggtcttacaaataccaacgaggtgcaaaagaggctgcatataactctctatccaacccccaccttgtttccatcttaaaatggcccagtgttcatctttcactggttttgcacacatcgctccagaaccacccgtcaacaattatgctttaggcctcagcattagaagccaaactaccagctctagggcctcacccaaggaaactccagtgattctaatcacttcaagtgactctaatcacatgaagtctcctcgttttcagcaacttccttgttttgagcattctcagtccagaagaggcggaaagctgcggcccaccttcttttccacnaaggctgacaggacatgggtgtacacatctgactggtccagcaccgcctgggtccgcaccggcctcttgaggagcgggctgcttcggytctgccctgcttccacygcctgaaagaaaaaaaccacaaactatgatcttcggcatcttagaggaagggtgctgtttacagttcatccacaaggactgaattcttcgatgtggacccaggatatgagcggaaaacactttctctacttagatacaactttttcctgtgcgcatgcctgtaatcccagctactcaggaggctgaggcaggagaatcccttgaacccaggaggcagaggttgcggtgagccaagatctcaccattgcactccagcctgggcaataagaacaaaactccgtctcaaaaaaaaaaaagcagttcagatccgtgcagattatgcaatagctgtggggtgtagcctgagaacttgcatttccaagaaactccagatgctgctcatgtggctggtcagtggcccacactgctgagtcatgacggtttatggagcccagcagaccgtgtgggacggcacagaaactgccatttgggatcagacctactgattcccacagcccagaacacccacagcaatagagtccaaaaggactcagccatccctcacgtctggcagcgtaggaatggacactgtcccagcaactggccctcttcagtgcctgtctcagacctcttacccttccatgaacagctaaaggggagtggagttctggggcttttgttggtttaaaaccattttcagcctaggactaatcagatcctggaattgaaataattcattctccttgtcctaaacttttcttctggcttcagaagatatgatgtacaagtaatacagcgggaattggtggcgataagccatggttattaccttgactacaaacacgcctgctaagtgctaacactgaatcgtcactatctcaacaggattctttcccaaaagggaagaaaggtgtggcaaatataaatatttctaatttaattttctaagtcctcactctggcataacagaaaaatatacaaaatattgcaaagcagagactgatttttctcatctataacagtagaccaaggatctacaggcaagatcaaacacagatgggaaaaacaaaaacagtgaaggtatgaagtgagatgcagccgccagctcgtgggatgcagggaccctgaatttactactcctccactatcccccactactgccaccttgccctatggcaggcggcaaatctcagcgaccttattctaatatataggaaacaattttgcatcataattacttagaaaatacccgggagggggtgggggaggaggaccctttgtcatactccatgtaactcaccatcgcataactctgstcggcatccaggtactttttatactcatggttgagtttatcaaaaacagtggctatcacgggcagcgatgctctgtctgactcacttaacactggaaaggcacaatgttcacacacggatcaaaccaacttcatgtcagcttcagaatttccacacgttgctatgataaaaactaatctcaaaaggttaccaatgcaaaagtacctttaaaggacactctaagaaatacaatactttaaagacctgacagctagatgtcattcgcaacccctttctggttacggttaaaaaaaaaaaaaaaaaaaaaagctatagcaggccaggctcagtggcacatgcctataatcccagcactttgggtaggccgaggcagaaggatcacttaacgctgggagtttgagaccagcctgggcaacaaggcaagaccccatctataccaaaacaaaaacaaacaccaacagcacatattggtaggggattattattattatttttttttggatacagggtcttgctctgtcgcccaggctggaggtacactgacacaaacggctcgctgcagcctcgtcctcccgggctcaaggaatcctccctcggcagcctctggagtagctggggccacaggtgtataccaccaaactcagctaattttttttttttttttttttttttttgtagagacagggttttgccatgttgtcgtccaggctggtctcgaactcctaggctcaggcaatcctcctgcttcagcctcccagagtgctgggattataagcatgagccaccatgcctggcctcagtaggggattcttaaagaagacacatatgcagtgagtggcttggattttgaaagaggtgtgtgtgaaggccaggggtggtggcccactcccctcctgtgtgcccactttcattcagaaccatcccatttattgttcttttctaccagtatctctacaaatcatctttccatttagcagcctttcctagggggtcacatagccacccctcacataaagaatgaggctgtgggtcacagacaagacacaacaatgtagcccacatcccgataaaaagtgttgggcagcacaggcctcacactggaatcagagcaagggggaaggattcaacttactctgtgaacagacagacaggatgaccatcttgcattcctttctctggaggagaaagtccatgagtcttcctttgtctggtaagagatttactatgggctcaagtttcacttggaggttccagaggtaacctggattttaagaggcagcaaataaaacagtatgatgcaaaccgtaacaaaagcccaaaagtggttcccctaaacatctgcggggcgggtggcaggtggtgataaaaagccgcaaagtacagtcagtgtagcttttccttcctaaccaaagcagagctgagccattcaggagcaattcaggagcgtgtctaccacaggaggatgacagcccaaccaccgcacacctggctgactcttttccaagtaacctctgcattcaggggcacatcaaaggtgtagctcctagtccttcattccaaacggggacttccctagacctagcccctcttttaacgtttaaaatagaaaaagatgtcaacacgtggcatcaacttcagtcctgtgctttggtttctcctacaacagctcattagtttaaaaggtaactccagaggctctcaatggaacatcataactcatccattcatcgacccataaatgtactgatcacccacactgccagcatctggtgtggcctttcccaattgggatgccacaggagaatgaagtgccacataaaaaatcatctgggtgacccccttttcagttggcccaaggcaggtacagagcagctgtacaggaaaacaccagcgagatgcacaggagagaaatgacttcattacatacatacagtggatgtcacatgaggctatgggttacagacaaggcacaacaatgcattacatacagtggatgcctacagcatcagggctaattctctcctcaagagttcttaggaattccagaggaaaggcaggaaaatacacagaggattaaagagtaacataggagattctctaataaccagcctggcgaggtattagagacacaggggcaacatggcaagaccctgtctctacaaaaaaaaaattataggccggctgtggtggctcacacctgtaatcccagcactttgggaggctgaggtgggcagatcacgaggtcaggagatcgagaccatcctggccaacatggtgaaaccccgtatctactaaaaatacaaaaattagctgggtgtggtggcgcatgcctgtaatcccagctactggggaggctgaggcaggagaatcgcttaaacccaggagt

SEQ ID NO: 8801 - DNA, 45028 bp, Homo sapiens
gatcatggtggataagctttttgatgtgctgctggattcggtttgccagtattttattgaggatttttgcatcaatgttcatcaaggatattggtctaaaattctcttttttggttgtgtctctgcccggctttggtatcaggatgatgttggcctcataaaatgagttagggaggattccctctttttctattgttggaatagtttcagaaggaatggtaccagttcctccttgtacctctggtagaattcggctgtgaatccatctggtcctggattctttttggttggtaagctattgattattgccacaatttcagatcctgttattggtctattcagagattcaacttcttcctggtttagccttcggagagtgtatgtgtcgaggaatttctccatttcttctagattttctagtttatttgcgtagaggtgtttgtagtattctctgatggtagtttgtatttctgtgggatcggtggtgatatcccctttatcattttttattgtgtctatttgattcttctctctttttttattagtcttgctagcggtctatcaattttgttgatcctttcaaaaaaccagctcctggattcattaattttttgaagggtcttttgtgtctctatttccttcagttctgctcgattttagttatttcttgccttctgctagcttttgaatgtgtttgctcttgcttttctagttcttttaattgtgatgttagggtgtcaattttggatctttcctgctttctcttgtgggcatttagtgctataaatttccctctacacactgctttgaatgtgtcccagagattctggtatgttgtgtttttgttctcgttggtttcaaagaacatctttatttctgccttcatttcattatgtacccagtagtcattcaggagcaggttgttcagtttccatgtagttgagcggttttgagtgagtttcttaatcctgagttctagtttgattgcactgtggtctgagagacagtttgttataatttctgttcttttacatttgctgaagagagcttttttgtatgctagtgagatgactaggggttaggggttcaggatgagggctggttgccaggagaaccaaccttgtgattagagggttagaactttctctcccaccccaccaccacgccacttcccatccccctacctcttgggaggaaagaagggctgaaggttgagttaattaccaatgaccaatgatttaatcagtcaggcctgtgtaatgaagcctctaagaaacccaaaaggggctgggtgtggtggctcacgcctgtaatcccagcactttgggaggctgaggtgggcggatcatgaggtcaggagatcgagaccatcttggctaacacacggtgaaaccccgtctctactaaaaatacaaaaaaattagccaagtgtggtggtgggcacctgtagtcccagctactcaggaggctgaggcaggagaatggtgtaaacctgggaggtggagcttgcagtgagccgagatcacgccactgcactccagcctgggtgacacagcaagactccatctcaaaaaaaaaaaaaaaaaaagggctgggttcagggagcttctgggtagatgagcatgaggaagttctaggagggtagaacatctggtgaggacatggaagctctgtaccccttctcccacacctcgccctatgcatctctttaatctggctgttcatctgtatcctttgtaatatcctttataataaatgggttgatgtaagtgttgccctttgttctatgaatagttctagcaaattaattgaactcaaggagaggggttagaagtacagattacaaccttgaatcttatgacacttgaagtggggggcagtcttgtgggacttgtaaatcaaaaataaaattctaagcccccaaactgactgaattgaccctccttttgaccaagaggacccaaggaaatctgaaaaattaggccatgatggaaagccagtaggggcagctacagggggtggcggggacagacatgcctcattatactcttcccttttggagttcaagcacaactgaccaacattaacattgaaacagtgatcttaaaactgacaaaacagactctttgtagcaataagatccaaattctaaaatgactctagtacagcatcacataacagatagcaggccctgaagaaaatcaaagtcttttaccccaaaatatatttctttgacacattttgaaatggccctgcaaagctgtctcttgtggggaaaagctgcattctgtaggaaaatctccttcctttgttgcgggacaatcaaagactggagagactgaaaaaggttcaggagagtttattaaggtgatcacaggctcagccagacatacatccagaaagtctgagccccaaactaaaggctttcctacttttaaacatcttaaggcgggaaccatgtgaggcaggaagtaagttacggaagagagaaacaaaggcagttaatcaagcattacaacatttcttacatcttgagaaaaacatgtcttccaacctaaacttatcggtcttgtgaccctgaagccatgctagggaggtaagcaggaactcactgagcctgtaataaactttgatgaatgtggagttggggaatatagataaggtccactgaccacagagagaagacaggctgttaatattctcttttaacttaagtataactcaagttaaagttgcagcaactttaagaggatttaaaaatttctgttaccactactattaggttatagttgatttcattaattccttcttcatctttactatgtatttccagagagtgtgataccttttaacgtctaataagagacattcacaagtgttctctttgaggcctgctacctggaggcttcatctacttgaaaagaaccttggcttccgcaaccccccaccctttaccttaactcaagctgatttcaattcttcagccagagtttagccctttcaaccaattgccaatcaggagatctttaaatccacctattacctgaaagcccagcctcttcctcctttgagatgtcccaactttccaggctgaaccaatgtatacacatttttttttttttgagacggagtctcactctgtcgcccaggctggagtgcccaggctggagtgcagtggcatgatctcagctcactgcaacctccacctcccaggtttgagcaatttttctgcctcagcctcctcagcatgtattgatttatgtctttgcctataacttctttgtccctaaaatgtatcaaatcaaactgtaacccaatcaccttgggcacatgttctcaggacctcctaaagctgtgtcatgggtcatgatccttaaccatggcaaaataaacctctaaattaattgagacctgtctcagatactttttagtttacagattgagaccttaacctgtaggatctgacactatttccaggtagacagtgttgaactaagtaggacatgacacccaagctggtgtccactggagaattgcttggtatagtgaaaaccccccacacgtctagtgtcagaagtgttattgttagagtaggtagtcaggcagatatgggcaaggcaggaaaggcaggaatgtcaggcgacaatcaggtgatggtcaggcggttattaaactgtcactctaaaataattggttgcagtaggtgccagggaaaggcagtctcctaagagatagaaaacacctaaagctggtgatcagcagctttccaataagatctcaggaactgggcaagtgtgctcaagcatgcgtactaagaggcaaaatggcagattttaactggtatacaaccttcctctaggaacacttgactggtaagggaaaaacgcctcaaatgagaatgtgcacaacttcagtaaagacattgcacatgtggcccctcccaagtgctgacaggccactgcacgtgcagacagcccatgccaaggaaaaaatcaaaggagatacaaaacctcggaagcatgccaatgtataaaacgcaaagtcaaaagtcaaacagggcacctggatctctcaagttgcctgcttgcccctcttcctttggttcctgctctaaaactttctaataaactctcactcctgctcaaaaacttgcctcagtctctcactctgccttatgcctcttggatgaattctttcctttgaagaggcaagaatcaagttattgtagatccgtatggattcaccactgctaacattatgctgaatggtatgtgagagtagaaaaaaaaacactgttttttccctgtctctaataatgagcttaacatcagaatagaaataatagaagaaaaaaatcaaagaactggaagccagaatttactcaacctgaacaaaagaaagaaactagaatgggaaaaaaaagaaaaaaaagaacagagcctcagggacctgtgaaactatcataaaagatctaacatgggggctaaaaatttactccaagaaataatagctgaaaagttctcaaatttgtcaagagacataactatagaattcagcaatacagaaaaagaaatatacaacaggaccaagcaaggtttattccagggaggcaaggctggttcaatattagaagatcagtgtaatctatcttattaacaggctaaagaagaaaaacaccacatgcttatagtaactgatgcagaaaaaacacttgccaaaattcaacacctattcatgataaaaacactcagaaaaaaatagaaatagaggagaatttcctcaacttgataaagggcatctacacaaaacctactactaatattgtacctaaccatgaaagactgaatgttttccctctaagatcaaaagcaaggcaaggatgtctgctctcatcactcttattcaacgtagagctagacactctagcctgcgcaataaggcaagaaaaggaaataaaacgcatatagatctgaaagaaagaagtaagatctgtttacttatttacaggtaatgtgattacacagaaaatcccaaggaatcaacaacaaaagactcctagaactcaaaagtgaccaacaaattcctctttaagtaaagttgggtctctcacatgtaattgaaagagtcctttatttattcacatatccatcaactatttattgaatgcctaaaatttgccagtagctattccaggcaatagatacaccatcaaacaaaaagagttcttaccctcaagggtgatagtaagagatgtaaaaagttaaaaaatggtaaaagagaaaaaatgaagagtgctactttagaaaatgaggtaagggaagagttatttaataagacacctcagaaaatgaggaatttggccagggggatatctgaggaaagagttccagtcagtggaaactgtgaattcagaaagcctgaggctgaaacaggcaagtgtgtttgagaaaaagcaaggaggccggtggctgtgcagagtgaggcagaggaaggagaatgggctgtggatcagaggaccctgtgccagatcatacaactccttgcagttcatgtaaggactcggattttacctggagtggaaaaagaagcactgaaagatttgagcaggggagtaacctgatagcgtttatgtttagtcctgccacttcgacagataaacgcaccaatgggcttgatgagatttaggccaacccataaccgcccctcaacttctttcctttcaatttcaaaactcctctatggcttcctccatctgttcttccttctgagaagtgctctctctgcccctttacagaactaaccacttcggcaactccttggacactttccttcttgttaataatttgctttctccgcccctcaaaagcttgctgtttctgtaaatcattacctgtaagaggaaccgctgggagtcctgtaaactttagcccagagcttggctcctcctccagaatgtctccaccaatcaaggaaagtgttttgggccagtcttgctcctccggattgtcagactgctcctccctcttctttagactgccacgaggaaaaagcagatgtgagaactcaaggttcagggctgctcttctaasaaacaagtctgccataatctccatctgtgttggaatctgttaactagtgagtacctcatctcccctcctgtgtaagatttcctgaactggcacatctgttttttgagcaaagataacaaacagatgaacaaaaccaacaatcaaaaatgctgtcattaaagtcttgggcagccaaagtttctctcagaatttctcagttgtgtgatactatctattaagtgatgaggagtatgcacacacaaaaggctataaatgtagcagctgagttttcatgttgagccttttggtgctatttgattttttgaaaaactatgtacatgtattaagttgataaattttttttttaattttaattgaaccagatgcggtggctcaagcctgtaatcccaccactttaggaggctatggtgggcagatgcagatcacttgaggccaggagttcgagaccagcttggccaacatggtgaaaccctatctctactgaaaataaaaaattagccaggtgtggtggcaggtgcctgtaaccccagctacttgggagcctgaggcagtagagtcacttgaacctgggaggtggagtttgcagtaagctgagattgcatcactgcactccagcctgggtgacagaacaagactccatctcaaaaaaaagaccaggtagtggctgagattttcattgtactgtctgcttagctccccaccttgctcagtgacagatgggaatccatcttctgcatcatccagaaagtatgtaaattacttccaggaaactttgggaaacacagatgcaaacctaagagcagccagttttctcctttaggtggtcaagggcagctgcaaaagttctgtataggaggggcttcaggcagggtctggttgggtttggagacaacagcagtgaatttaccttgcgttgaggctgtatatgttaaactactgttattacttggatacttagagggagggatgtttagggagctgtggggaggctaaagcccccttggctgtagggacaaagagcttgcatttcagatgagaccttaaatactttcagaagccyatctgaccaggggtggtactgtctttcttagaagagttttccttaccaatgtttctgtggctcagtataaaaatctggagtcaccctgggaaagttatctcagcaattttacctacaaataattttataaacctgggaaatagaagttgtaaaatgctaagatcgatgaaaagggaggaaaagaactttgttgaggagaaggtaatcttatggttttgatgaagaggatgtcgatatttgctttttggtagaacagaatggttaggttcattttaagctccaaatgactgatcaattttcttttcaacatacgtttgaaggattctgaatgtggtgtagagtattgtatgggagctagggaacaaatcatactaaactctgattctattcagaatcagcaagctaagtatgatatatttatctccaatcatattaatatttacataattatttaatgtcttccttaatagtctataagcttcatgggagcaagaccagccgtgtcttgttcacagctatattttcagcatttagtacaggtctggcatataccaagtgttcaataaatayacgggtaatgaataaatgcgttgtccaatttaaatatgtgtgtctgtttgtgtatacttccttgtctgtaaaatgaaaatactaataaataactgcaaaatgcttaacagtacaaccacttgccagatctcagcaaaaatgttacgtccctagagagacctcctaaaaggtcccttttctcccattactctctttgttttcttgcgtaacatcacatttatttattcccttgtttactatatgtgtctttctatgagagcaaggaggaccttgtctcttgcattccctcctgtatcctctatgtctgaaataattcatggcaagtgattaataattgttgaataaataaatgaatcatgccaacctaccaagaatgaagctcaagaccttaagatatttgtccaaattcctgccttttatttaatagaatcagaaattgtttctaatacttcacaaccacttaaaaatactattcatttttacatccaagtaatgaaagaatcaggacgttccttttggaagacatagtttcaacattttatctaaattgcaaaattatacaaaaactcaagtgaccattgataggggaccggtttaagaaatgacagtgcagttcttcactagaatgtcatacaactgttaaaagaaaaaaatcagaacagggctgagtgtggtggctcccacctgtaatcctagtgctttgggaggccgtgtgcgtgtttgtgtatatttccttgtctgtaaaatggaaataataataaataactgcaaagtgcttagcacaggaggattgcttgaggtcaggagtttgagaccagcctgggcaacatagtgagacccccatctctaaaaaattttttaaaacacttagctgggtgtggtggcacacacctgtaattctaggtactctggaggctgaggcaggaggatcgcttcatcccagaagttcaagctgcagtgaggggtggtcgtgccactacactccagtctgggtgacagagtgagatccatcctgtctttaggcagggaaaaaaaggaaagaataaatgaataaatacttcatttaaaaaaatagaatgaagatctctgcgcactggtatggaaagcccttaaaaggtacattgttaaaaatgtttttagtgggcagaatagtgtgtattctgtgctacctgttgtgtaaaattggtggagaaataagaatctatactcataatttgcttgaatgcacataaagaaaccctgaaaagataagtagaaataataatagtggtttcctgggagtgagagcaaagtgggcagctttgagactagaggtgggaggcagatatttttttttccctctgtaccttttacagtttttttgagccatttgaagatattatgcgaaaaaaaattaaaaacagagagagacaagtagtgttgattacttaacttctttcagttgaaggaaacctgatgctaattctgttaagaggagagcagccaaaagcataggttgtgacttgccagcaaaaaacagggaccggtagttccctctgtacccaatccccaatgccaaacagaatgacattgttagacttaaggtcttaacctgcagggcaactgggattcagagtgattttagttctgttcttaagagcagccttttctcctaaagcctgccaagaaatttttgttaattcttcccaggaacataacagacaaggcccctgctctggtagaacttacatcacagtgcaaagatcagcaaactgtagcccatgggtcaaatccagccctctgcctgtttttgtatagcctttgaaccaagaatggtttttaaattttttaatggttgaaaaaataactaaaagaggaacactaattcatgacacatgaaaattaaatgaaattctagtgtcagtaccataaataaggttttattagaacacagccatgccaaaatttatttatgtattgtcaatggctgctctctcaatggcagagttaaatacctgcagcagagaccatatggcccacaaagcctcaaatatttagtgtctggcccttcacagaaaaagtttgctgacccctattctagtagagagtaatatgcttggcaccatgataagcattttgcatacagtatcccattcagtcttcaggacaaatctctgatggaggttctattagtcgctccattggtaaaatgtgaaactgaggttcagagtgattaataattcaaataaggtcatgcagttcataagaggcaaaactgggagaccatatcacatgaccatatgactcagtagccagtgtatttaaccatcatgccatagactggtgcttttcacacttgaatgtacataccagtcacctgggatcttgttaaaatgtcaacatctaccaattcagtagatctagagtggggcctgagaatgtgcatttctaacaagcttctaggtgataaagatgatgatggtggttcacaaatcacagcctctaaatcagtgattctcaaccatggctgctgcacattaaaatctgaggacattttaaaaaatataaatgggcccagagcccactctgaaatattctgatttaattgatccaagacctaggcatcagagtatttttttttaatgctttcttggtgattcaaatgtacagctggactgcaaaccactgctctattgaaatcctgtcgaatgacagtaaaaacatttaatccaaagaccagagttctagttctaactctggtatgacagaatgaagcaggctgtttcccctctctgggtctccagttttctttgcaggtgaaaaaggaaaaagctgaaaccagatggtgtcagagggctcaagatcactgacttgtcaggtcttcacacacataaatgggaaggacagaagtacccaggtttcctgatgcatcggttatatcaacatgatgcccaaacaccaggtctgcttagggtaaaactgcaataactgtagatgtcagctaaactgtccatttagctgacatctgcaattatgtattgttttggcaatgtatcaatacagaaatgcttccacatagccagactgccttacatggcacacagctagaattgtagttagaatgatgatttaatgattatgagagtaatatatattgcattgtaggaaatttggaaaattacaggaagtataatgaggagaatctcaaacactcataatccctagaactgtatttttaacagcctcaaccaagtaaatgacattgtgatcaaatgatttcccacagaagcaggcgatggcccagaggggcctccccgacaaaagtcctaaatgttaaagccccattattacatctctattaaatgcagctccaagcctggacttaaaagtagtatgggcccctattgagagcatgggaactgcaacctatcaactagacagttcataaactgtgacagtgctttcatgtctaattgttattgggctactctcgatttcttcatctacagattatccactgtgaaaaatgctccttaacatttctaccctactttgaaatctgcaggtgaaagatattagacaagaagccttagccctttgctttcagtgagattaagtgggtgacccagatctttacttctttagaaatgcatatgggtgtcaatagtgcacagtattctggagaatgggctaggacctgatagttctgggttcaaatccagccaatgcctcttactagtcattttctcaatctgtaaacagagatgataatagtacccacttcacagggtttctctgaggatttaataagaaagtgtctataaaacactgagcactgtgtttggaacacagagtgtacgcagmaaatggtactatcatgatgattatcaatactaataacaaaacttagccactttggggtatggctaccttcaggacagaaacaaatatatgtcctttttgcttgtcttttagatgaactggtctctgtgcaaatccygagtgctaaagcttccaacaagactgatgctagctcgtgtcaccaggaagatgctacgtcatgccaagtgttttcagcgcctagcartttttggttctgtgagggcactgcataaagataatagaacagcaacccctcagaatttctccaactatgaatccatgaaacaggacttcaaactggggattccagagtatttcaactttgctaaagatgtcctggaccaatggactgataaggaaaaggtatggggggagggccagtcagaccacaatttctcaactgggagtgattttacccctaggtaacatctctaatgtctagaaatatttttgttgccatgataggggcagaggcagttgctactggcatctaacaggtaaaagccagggattctgctaaatatcccataatgcacagggcagcctcyagaacaaagaattatttgaccygaaatgtcaatagttccatggttagttgagagaccctgtattacataaatgtagaattctaggttgacttaaaaaaraaaaaggagaagagtgaaaagtaattccaagagtcagaaatggtagaaaaggaggcacagataaatctttggggaaaatrtaaaggakgcaagaattctcacttattggaaagaaaaatgatcaggctaaatgggaaatgatttgggccaaaagaaatgacatggcttccaacgtctagaaataaggaccccaaagttattatttttcctgttatgtttagttatgtaataactatacatagttatggggtacaaagatatttttgatacatgtataaaatgtgtagtgatcaaatgagggtaattaggctacccatcatcccaaacatgcatcatttctttgtgctgggagcattcaaaatcctctctcctagctttttgaacatactcaatatattattcttaactgttttcactctacagtgctatagaacactagaacttattccatccatctagctataattttgcatccattaaccaacctctttctatgctcctctccccactaccgttcctagcctctaatagccacaattccactccctacttctatgagctcttttcaggctggagtgcggtggtgtgatctcagcccactgcaacctccgcctcatgagttcaagcaattcttgtgcctcagcctcccgagtagccgggactacaggcacctgccaccatgccggctaatttttgtatttttagtagagacagggttttgccatgttggccaggctgaccttgaactcctggtctcaagtgatccgcccaccttggcctcccaaagcactgggattacaggcgtgagccacccaccacgccaggccgagctccttttttttttttttttttttttttttaagagacagggtcttactttgttgcccaggctgaagttcagtgaagctcatttttttaagctcccacatatgagtaagaacatgtggcatttatctttccgtgtctgacttatttcacttaacataatgtcctccaagttcatacatgttgccacaaataacagaatttcattcttttttatggctgaatagtattgcactgtgtatatataccacattttctttatccattcatctcttgatagacatttaggttgattccatatcttggctattatgtacagtgctgcaataaacatggcagtgcagatatctcttcratagactgatttcctttcctttgaaaaaatacccagtggtgagactgctaaatcatatggtagttttatttttagttttttgagaggcccttatattgttttctgcaatggctgtactaatttatattctcaccaatagtgtttcagagttcccttttctccacatcctctcaagcatttgttatcttttgtctttttgacaatagccattctaactggggtaagatcatatctcatcrtggttttgatttgaattatcctgatgattaatgatgttgagcattttttcatatacttgctgccaattagtatgtcttttgagaaatgtctattcagattctatgtccattttttaattgaattatttgttttgttttgttttgttttgctgttgggttatttgcattccctgtatattctggatattaattccttgtcaggtgaatagttcacaaatattttctcccattctacatcttgtctcttctctctgttgattgcttcctttactgtccagaagctttttagctttgtatagtcccatttgtctgtttttggttttgttgcctgtgttttcatatccttatccctaaaatatttgcctaggggagtctcagagcctactctggctcaggatctgcccaattttattaaatttattataaaatttaaaaaatttwaaaaattaaaattaaaataaaaaataaaacatttgccttgatcaatgacttgaagcatttacactatattttcttcggttgttttatagttttgagtcttacatttaagtctataatccagttcgagttgatttttgtatatggtgagagagagggctctagtcttagtctaccacatatgattaccacttttcctcggaccatgtactgaagaggatatcctttcctcagtgtatgttcttggcacctttgttgaaaatctgttgaatgtaaatgtgtgggtttagttctgggttmtctattctgtttcattggtctatgcatctgtttttatgccaataccatgctgttttggttactatagctctgtagtatgatttgaagttaggaagtgtggtgtctctactaaaaatacaaaaattagccrggcatggtggtgcatgcctgtaatcccagctactagggaggctaagggaggagaatcactttaatctgggaggtggaggttgcagtgaactgagatcacaccattgcactccagcctaggtgacaagagtgagactccctctcaaaaaaaaaaaaaaaagatttagtgttagttcttatggtagaattcagcagtaaaaccatccaattctgggctttttttattactgattcaatctcattacatattattggtctattcaggttttctatcttggtaggttatgtgtgtccaggaatttatccatttcctctatgttttccaatttgttggcatatagttgttcataagagtctttaatgatcttttgtatttctgtggtacagttgtaatgtctcctttttcatttctgattttatttatttgggtcttctctttttttcttaatctagctaaagatttgtctattttgtttttcctcaaaaaattttgttttgttgatcttttataattttgcctcaatttcatttatttctgctctgatctttattatttctttctttctactaattttggatttagtttgttcttgcttttctggttccttgaggtgcattcttagattgtttatttgaaatctttctgcttgtttgatataggtgtttatggctataaacttcccttcttaacactgtgtttgctttatttcattgattttgatatattatgcttccattttcattattttcaagacattttttgctttccttctcaatttcatcattgactcactggtcattcaggagcatgttgtttaatttccatgtatttgtacagttttccaaagttcctcttgttactgatttctagttttattccattgtggtctaagaacatacctggtatgatttcaatttttaagaatttgttgaaatttgttttgtgccctaacatatggtctattctggagaatgtgccatgtgctgatgagaagaagaatgtgtattctgtagctgttggataaaatgttgtgtaaatatctgcgaggtccatttggtccaaagtgcagtataaatccaatgtttctttgttaattttctgtctagatgatccgtctaatgctgagggtagagtgttaaagtcctgaacattgttgtattggagtctatctgtttacatctaatgatatttgctttatatatccaggtgcactgatgttgggtgcgtatatatttacaattgttatatcctcttgctgaattgatctatttatcattatataatgaccttctttgcctctttttatgttttctgacttaaagtctatttcatgtgatataagcatagctattcctgcacacttttggtttctatttgtttgaaatattattttccatctcttcattttctgtgtctttttttttttttttttttttgagayagcgtctcactctgtcaccaggctggagtgcagtggcacgatctcagctcactgcaacctccgcctcccgggttcaagcgattctcctgcctcagcctcccaagtagctgggactacaaggtgcacgcyatcatgcccagctaatgtttgtattttttatagagacggggtttccccatgttggccaggatggtctcgatttcttgacttcgtgatccgcccgccttggcctcccaaagtgctgggattacaggcatgagccactgcgcctggccctatctatgtgtatctttacaggtgaagtgagtttcttgtaggcagcctatagttgggtcttgttttttatccatttagtcagtccatacagtccatatcttttaactggggaatttaaactgtttacattcaagattgttattgataggtgttattttgttcatcataagggtgccagcagtggctccagtgggtcccaggcaggctgatcctcaggctcccaggaagtgtgcatgggcactggcagtagcagtggtaagcctcaagtgagtcagacctcaggtcctttggcagtgcacatgggtacttgtagtagtggcagcctgaatgggccagtccttgggtccgcagatggcaatgcaggcacaaagcggctctgccactagagggggcaagatcatgttcatggcagcaggctcaggaaggcagctctcaggctctggggagtgtgctttagtgccttatgtcctggggcagcctctcttgatgtgctggactccctgttacctggggtgtagagtgctgtgtgtaggctcgggtgccagtggcctggytctatcactggatccacctggtgttggaatgctgcagccctctacgggaacgtgtggggatgtcagcaaggccccagggatgtggagatgcaggggcaattggccccagggcaagatgtagtatggtagtagctctgttcctaaaatgatgccatgctatagcagctcgggtcctggggtttgttgcaggaggacctagtatgaacttcctctctggaacaatgttatactatactagtatactatactatacagcgtttactaggctcagggcatgtgagggctgaggggctctcctgtaggtgggacttcaggcatctgtgatgggaatgtgtactgctgaggatcttccacttacattttcctcaaaatagggagtccctctgggctctgtgctgatcctggccagctgctcttcttccctctctatgctttcatctctagttttcaggtctcagagagttttgtcacttccttgctaaattccagtgttctccctttgacactctatttgtcatgttatctgcttactgtcttggtacttctggtaggaggtgagtactgggcatctctagtcatccatcttgatgatgtctcccccagagttatttccaaattctccatccatgttctaactaatgacttgcgaactttcttcagctaatctattccattgagtcagttggcccagaatttagctgtataacaacctttaaatcaatgactggtttttctttcctcaggctggaaagaaaccttcaaatccagccttctggtggatcaacagaaatggagaagagatgcgatggagttttgaggaacygggatctctgtccagaaaatttgccaatatactttcagaagcctgttccctacaaagaggagatcgggtaattctgattctgcccagggtcccagagtggtggcttgcaaatgtggcctgtctgcgaacaggttagtaatgtttgctttccgatcatatttattactaagctggaggggagattttccagaacacctaagtaatcatgatacatttattttgttgtrggcttattgtcaaagagtgcctttaaattatataaaagttaggcmgtggtaggctaattccttatccctaggtggaacatctttaaaagataatcttagagttacagcctcacaaaaattgttgtgttgccctgattagaaagaaaagatattctaaagaacctgtgttctggtcctggttgttggtttcttgaagaaccctgatggagaggcctggtccttcccaaagtgaaaggatgagccagtgtcaagagtccaggaatgccagacatgtgttccccaatcttcttgcctactgtgtcrcctgggaagagtaaaacctattgtgaagtgaatgctttccatccctgtcttaagggtctgggacttaagggtggtggggcccaggaggaagatctatatatttttgagagtccatttatcctttgagaaaataatacccaaagcttactgagcactgttctaagttctttacatrttttaactcatttaatcccctaattatcctataaaagaagtagtattattacaatatcactttacagatgcagaacctgaagctcacagaggtgaagtggcttgtcccaagtcccagctataagagtgtctggctccaggacactcttaatcattatacttcatcttacagtgtaatatataaccagcaggaatagaaccacagaaaagatgaatgcctccacacttccttttggaaakaaatcataaagcaatcatgtacattttaagaggcactcagctgatgtggtgaagtgtacagttctggagtcaggctacagggttcaatccctgcactgtcacttactacttaagtgataccttgggcaagttattcatagcttttatgttttggggtttttttggtggggactgaataagttaaaacatataatcaaatactcaataaatattggttaatattacttttcaatcaaaaccttcttcaagctcaatgttagggatggtcttcaaataaagaataattatccagtatttaacatgctttcatgttaagccaaaagggtcatagactctgaaatcccttgaaaggcaaaagcagataagtgaaagcaagataaatagatatcttcctggtaaactgamtaactcactctgagaaatacagaatgtatagatggtatctacactactctaacataatgaagaataacatttcttctaaacactgtttcttttctgcccctttagggacagttttaattccaggaaccactcagctgacccagaaagacattctctacagactacaatcttcaaaagcaaactgcattatcaccaatgatgttttagccccagcagtagacgctgttgcatccaaatgtgaaaatctgcactccaagctgatygtatcagagaactccagagaggggtgggggaacctcaaggagttgatgaagtgagtagccacacttgttgtaaaacagcttcccaaaaggaaaggcaacaataaaaagatattaaacccagcagtgattagaaaaatgcaaattaaaacaacaggcaaagggaacagttggtagttattgctgcactaatagtgctaaactctgaagtaggaaggagcttggagtgctttttgtaggttgggatcccctgagattggagattggtgtataggaagtttattaaggagttcttttgggattaacacctgtgaggaatgagtaagaatgtcggactgggcagagaaagaaatttatttgcgatgtattccctacaaagctttcagtcaacccactgggacctctgaaggacctcctcaaagctgttcccagctaaagcaagaggtcctggcctttatatacccacattgatcagtaattggatgrggttgtccctaggagtcaagacctttaacaaagccactgtcttcagtcaaggcaatctctagagagtgctcccagcacctgtcactgaaggatcacagtcagtccttcagtgttggctatcccattcccttgctgacagcaacactggtatcaggttaaaagaaaaaatgcttaatgttaatggatgcaattataaaagtgaatttcactgaygttgaagcctagcatggggtgtttccatgggttacttggaactcttgccaggtactggttatgccttagaattgggctggcagcaaagtccttctctagaatgagcttcctacctttactcaaggatttgggagcatgcttgcaactatggacttttcctaccacatttaaaattcctaatattgagttcttgccaaaggccaagtacggttctaataaaaataatgttataattgcaatcatagcttatattgatacggttatgtgccagaaactattctaaggacttcagatatattacctcatttaaacctcacagcaacctaggtactataattacacagctgaataaggtcaaatgctagtatctggcagagctaagtttcaaacccaggcagtatgggtgctgagcctacactcctcacttctgtatgtactgcctctagtaagagatcagtacaacaacccttcctcaggttttgagggcaaccgtattggtgatggaagtgataggaacacagctatagatacttttttttttttagayggagtctcactctgtcacccaggctggagtgtagtggcgcaatctcggctcactgcaacctccrcctcccgagttcaagcgattctcctgcctcagccttccaagtagttgggattacaggcacatgccactatgcccacctaatctttttgtatttttagcagatatggggtttcgtcatgttagccaggatggtctcaatctcctgacttcatgatcygcccgtctcagcctcccaaagtgctgggattacaggcgtgagccactgcgcccggcctatagatagtatttttaattaattaagataattatgaaatcatagactgaacacttggtgtagctttgtcagattttgaaaacagctttttagccaggcgcagtggctgatgcctataaatcatcactttaggaggctgaggtgggatgatggtttgagtccaggagttcaagaccagcttgggaaacacagtgaaacctcttctctatataaataaaaataattagccaggcatggtgatgcatacctgtagtcccagcctactcgggaggctgaggtaggaagatcgcttgaacccaggaggtcatggctgcaatgagccatgactgagccactgcactccagcctgggtgagagagagagaaaccctgtctcaaaaaaaaaaaaagaaaagaaaagaaaagaaagaaaagaaaatagcttttctatatttctcatgaatggcctggttgtttctactcattctcaaccccacatgcctggataagtctgtgtgcatcttagacacttgatatgtatgtgtgcagctgccctaatgtgtgacttgtatagaagtctgattatcctttggaactaaaaggttttctttctctttaactggaactctttcttccctggatggatgcttagatcctgttcaatcttattgtctgctatatccagaactatgtagactctcttgtgggaaacagaaaagccaacctttcacggtcagcaaacttttttttttttttttttgagacagagtctttctctgtcacccaggctggagtacggtggctcgatcttggctcactgcaacctccacctccctggttcaagcgattctcagcctcctgagtagctgggattacaggtatgtgccactgtgcctggctaatttttgtattttcagtagagacagagtttcgccatgttggccaggctggtctcgaactcctgacctcaggtgattcacccgcttcagcttcccaaagtgctgggattacaggcgtgagccaccatgcccagcctcagcaaacattttctgtaaaagggacagagaataaatacttaaggcttgcaggccgtatagtcagtctcatcacaactactcaactctgccactgtagtgtgaaagcaaccacaggtamtacctcaatgaatgggcaataacattttatttacagaaacaagaggcaagtcagattttgccagtaggctgtagtgtgttggcccatcagtacccatggcttttactaacatgtattgtattaacatactcatttttaaaaaatcacattttaaagcatccataggggagggaaggggaaaattcttccttatccatgattgcaagatcacacagactccttactctgctggaggtatgataaaaatctcaagttttaaaaatgcttcaatccttctttatcatagaataaaaagctaggaaagcagctattataaatgggcctttgatgacaaagtttagttttgattctagaaagcacctaaaaggatagagaaagtgatggcttttaccctgtaattcaagctaagccactggcacctgattcatgacatgaagaggttcaagtggagagcttctcaaaatttttcagtggtaacagtctgtgatgctgtgtttaacatgcagtcattgtagtttttcctttgcagacatgccagtgacagccacacctgtgtgaagacaaaacacaatgagatcatggccatattctttaccagtggaacaagtggatatccgaaaatgactgcacacacccacagcagttttggtttaggattatctgtaaatggaaggtatacttycacaaaagtgcagcttgaagtgtcaaaactgcaaagatgatgacttatgtactggtcttttatatttattttcctatgtacatcagggctactctttgttttcccaggttctggctagatttgacaccctcagatgtgatgtggaatacctcagatacgggctgggcaaagtctgcatggagtagtgttttttctccgtrgatccagggagcatgtgtattcacacaccatttaccccgttttgagccgacttctatcttgcaagtaagccaaagcacaaagaggtcaatatttagaaatgcattaagcagtatggctgacagaactggtgaataaagcaacttgcagagatcagagtagacaatatgatttaagatatgtcacatccagaaagtcaataagcctgaaaagatacactcggccccctctgtatccacaggttctgcagcctctgattctgccaggcacatattgaaaatatttggggagaaaaaccaaaaacaaaatacaacaattaaaaaaatgcaaataaaaaataccatgtaacaaatatatacatagcatttacattgttttaggcagtataaataatctagagatgatttaaagtatacgggaggatatgcataggttatatgcaaataccatacaattttatataagggacttaagcattcctggaaccaatcctgcagacactgagggatgattctacaagaaaaggtmagaatgtatttacattaacataaacaatgtttaaattgtgctgcgtcaaccaaagacatttaagcacttatttaagttgtagtaagaccaagagtttgctttttctaaattgcagacactctccaagtaccccatcacagtcttctgttcagcaccaactgtataccgaatgcttgtacagaatgatataaccaggtaagaaatgttagtaaatwggcatctagtggggagaggggagaagaggaagctataaaataaaagatctttctgcctgaaacatagctccaagccagtagacacaggatttagcaatctctcctcttcctctttctccttcttgcctgcattctgtaaatgataattactgtgaccagggcaagatcccccaaacaagaagaaagtgagggttcagctatgtttatagctctaagcccagtggttatgggtaagaagatggtaaatcttttggatgatggctttctctgagctgagaaagtagagaacttgtttctatttggaaccttatcccagcagatagaaaagaggatgcatatcttttattctattgctgattccatttgaaagggttcattggtaatccaaaaagaaaaacaacccccgtttctctttgttttgtttttgtttttgttttgttttgttttgtttcaatagggttttgggaaacaggtggtgtttggttacatgaataagttctttagtggtgacttctgagattttggtgctcccatcacccaagcagtatacactgtactcaatgtatagtcttttatccctcacccacctcccaccctttccccagagtccccaaagtccattatatcattcttacgctattgcatcctcataactcaactcccagcaaccactattttactatattcacaacactcaatactctgggtctccagatgtaagggatcttttcccccacattgaccaattctccaacatcagttgagtatcctatgatttaattcagtctgacattatctccgtggaggcagcatcatatcccacaggttaatgactcagtcccacaagactctttcccatctcaaatgctaatcacaagtccaggctgtcacctgcgcatatgaccaaatggctacaaatcagaggttcccatgacccttccttgggtttagtaatttgctatgatggctcacagagtgcaagaaaacacttacttacatttcccagcttattataaaagatatgataaaagttacagatgaatagctagccagatgaagaggtacatagggtgaggtccacaaggtcccaagtgcagcagcttctatccctgtggagtgggggtgcactacctttccggcacgtggtgctctccaaacctcatacttcagggatttttttggaggctccattatgtaggcatgattgattattaagtcaatctccagctcctctcctttccctgaaggatggaggtgaggctgaaagtgccaagcttctgttcctggcttagtctttcttgtgaccaacccctatacgggagccccattgagagtcgcctcatgagaacaaaagacaattctattacccwggaaattccatggaatttagaagctctgtatcagaaactagagtcaaaggcaaaatattagaacaaaagatactcctagcacacccatcacttgggaaattacaaaggttttagaagctctgggccaggaacccaggatgaagactcagtacaggttgagtatcccttatccaaaatgcttgagaccagaagtcttttggatttcagattgttttggattttggaatatttgcattatactggttgggctgccctaatccaaaaacatgaaacctgaaatcctccaatgagcatttcctttgagcatcatgttggtactaaaaaagtttcagattttggagcactttggattttgaattttcagattaaggatactcaacatctatgtatttcttgttatagctcatatcacaggtaaatatatttaaactgatgttatttaattatcgaataggaaataattcacctgccataaaattcaaarggtatataaaaatacatagtgaaaagtcttgcttcaaaccttgtccccagtgacccagtcctcttccatggaggcaaactgagtttccagtttcttgtctattctccctgaaaatacacaaactgatacacatgtgttctccccgtctcaattttttttttttttgagacggagtcttgctctgttgcccaggctggagtgcagtggcacaatctcggctcactgcaacctccgcctcctgttcaagcaattctcctgcctcagcctcctgagcatgtaggattacaggtgtgcaccaccatgcctggctactttttgtatttttagtggagatggggttctgccacgttggccaggcaggtctcgaactcctgatgtcaggtgatccgcccacctctaactcccaaagtgctgggattacaggtgtaagccaccacacctggcctttccttctctattataaacataaatggtatcacaagattcacacagttctgcaccttgcttttttcctctaacaatacattctggcactgtgttgtgcaatatggtagccactaaccacagctagttatttcaatataaatattaagtaaaattaaaaattcaattcctcagttatactagtcctgtttctagtgttcaatatccatatagggctagcatatactgtagtgggtacagcagattacagagtacttccatataacagaaagttctactgggcagcactgtccaagagcttcctcatttttcatagctgtatagtattccattgtataaatatcccaccatcagttttaccaaacaattggtacttttcattgctgatttaaagtgttattatggtgctcacttcagcagtacatacactaaaattggaatgatacagagcagattagcatggcccctgcacaaggatgacatgcaaatttttgaagcattccatgaaaacataaaaataaaaacaaaataaaataaaatgttattatggggtaccttccctaagaacagaatgaccttctttgtaataaattatacctccaccacaaaaaggggggtaaagaaaaactagtatttggggtattctagtatcattctatgatattagaatgatttatctttttaatatctttatttttaatttgtgtaggtacttagtagttgtatatgtttatggggtaaaatggtttgttttgtgctagggagaggaattaaaaagcgactaaaacattttatattgaagttcataagaaataatccttaatcttcacttctctccatttttcctcctaaatctaacttayctggttttctgagaagctataagtttaaaagcttaaagcactgtgtgagtgctggggaaccaattacccctgacgtgactgaaaaatggagaaacaasacgggcctggatatctacgaaggatatggacagactgaaacggtacctgacctcactgaaaagacatagctggattccatttagtcagatgaataaaaaccaaagtgtccacagtctcctyatgattatttgagggataggagttgagtggttagaaaatgtttaaaaaaacaatgcttgcaagaacctaattgcaaaaaagctctgttaacagatagttgtttaaatagccattcattgacaaacaccactgttaatggatcagagtaagggcattacaatatttttttaaatgaaataatactggatctactgaaagaaagaattcctcccagtgtgatagggaagtatcttatttagggctgcctcaaaatggaaaatgctgagatccttgctgcctgaaatattaagagtttgctggacaactccttagcaaccatactctaaaaaggattttttaaagagctcatagagataaggaataagaaattctagaggaaatgaatgaaataagaacaaaaaatgaaataagaacaaaaaatgaaataagaaaaaagaacaacagtggttattttgtagaagagggaggagtaagatgaaatagataagggaaaagttgaaaaaacttttcacaatgtgtctttataatgcttcaatttatgaaccatgagaatgtatcacctggtaaaaaatgaaaatatcaaaaataaaaatcaaaaattgaaaaattcattaactagaaatagcataacaagtatgctaatataaatgcaaatgttaatatactcatgttttgataaatayggatatatgagtaattattgttataactatattttatacatatgcatgtatttatatgttatcactacattccatgagagtatagcattcattttgagcctagttcatagtaagttttcaataaataatttgttgaatgaatgcatgatagatgaataaattttaagtgacttgtaatgttatcttactttttcttcttcttaactaggtgctaatctgtggaaattttaagggaatgaaaattaaacctggctcaatgggaaaaccttctcctgctttygatgttaaggtttgcacatccccttccaggagaatgtttaacaacccaatctgtacactacctacctaccgcttacccccatataaactttctttgttatgatggtgattccattttacttccatgatactttaatttttataaatatgtgaaaatgattagaaatgttagcttcttggtctccattattttgcaaatacccatattgtaccatacagttctaagcatttaataaacgttaacccattaggctggatgcagtggctcacgcctgtaatcccaacactttgggaggccaaggcgggagcatcacttgagcccaggagttcaagaccagcctgggcaacaacgtgagactttgtctctacaaaaaaatataaaaaactagccaggcatggtggtacgtgcctgtggtcccagctactcagaaggctgagatgggaggattgcttgagcctgggagcttggggctgcagtgagccatgatcacaccactgcactctaacctgggccacagagcaagaccctgtctctaaataaataaatattaacccattgaatttccagaagaaaccctatgagaagcatactaatattagaaccattttacaaacaaggcacaaagaggtaaaagaactcaccagaagtcacacagctaatagctgctagagttgggattcaatcccaagcagtctggctccaatatctgcactcttaaccacaacacaacactggtcctckcaggcaagggaggtcaagaccttctgagcrggtcaactaggcccgaagaggcttcagtttacagtggctgcagcactttccctctctgctcccaagcctgcctggccatttccagcctctctgtatccactgccactactaccacctgatgcctagggggaattccagttccccatcagcaagctttatatagggttaaaattgttctcagatcaaccgagcttcaaagctggrtgtagccaaaggaacttaacactaatttggacactcctcaacttatgatagggttatgtcccaaaataataagtcatcataagttgaaaacatcctaagtcacaaatgcatggctgactgggagctgtgacttactgttgctgcccagcatctagagagaaagatggtttcaactgaatggttatctttttcacccattgtaaagttgggaaatagtaagttcgaaccattttaattcagagacccatctgtacgttaagagacagcaaaagcagcaaaaatatggatgaattaacagagtacagctcttagataaatgtttcccaagcttgtttgatcataaacatcatatggatatctgttaaaaatactaattctcaggcccctggagagaccaattcaatagatttggagtggaactctgaaatttgaaatcttgtgattttaacaagcaccccccaagtagtttttaggatcaartaagtttgagagagtttagatgagcttgattgctgctgtaactctttatagaataaaccagatcctgggtcctttctctcactttaaccttgctgtggaaacctggtctcaagataggatagcctagtggttcaactatatctctgctattcactgtctgagtgtctgtgggtacactgttaaagctctgtaagttccagtttcctaatttgtaaagttgggactagagtgaccaacctgtctgtttgcctgggacttatctggttttagcacttaaggcaatacatcctgaagaaccaccccccgacaacccctcaccacttcagtctcagatggttggtaaaccaaataataacagaactgatttcataggtttcttgtggtgattaaaggagacaatatgtttaaagagcatatcagaatgcttagtacataataaaggtccaaaagatgggtactgttatttacttctccctcacattcctctttttatttatttatttatttttttattttttcacattcctctttgaaaagcttatctaagaaaaaatggtaggagagcccaaacaggcttaacaatagtttgttggttaacaggctaccttaggttgaagaaagaaatattgataattaagcacactcatgtctgcattacagggaagttgatatgtaacacagctatgttctttttcttccttccttaatagcaattcccaacatgcatggctatcagggtcttacaggcacagctgtattcacagtgatcccaactgcaaggtacccccacctgctccccattaatttgagcccagtggttttctagagcagctatctttgaatgcaaatatgatgaggctgagaggaaaacagtactttkyctgcatccccagtcatttttaactcttttccacgggccgttattatggggcttyttgttccttagctaagggcatctgcagtaacattctggcatctggggatgtgttccaaccaggtgaatatcagattcctacaacttcaaagcccaacctttataatcttctttgtttgcttttaaatactcataattttcatgtttaaacattttaagaccctatgaacaatgaggaacatgattctccccagacacagaagattttatctatattcccatctattaaaatctgtaagtaactggaacttttaaaatacttcctttccatcaataattccttcatacctggaaccacatatttctttagataactgggtgggaatttatatttttttatttgcaagagcttaaagagaagtttttacgcttagaattcctttgccatttaagtttctcattcagcacataagcccctttccttttggaaagtgctagataagtattatacttattctccatgcaggccacacctcaggtttgaaggtatctggagaatatatataaaagcagaattttgatacttagaaacagctaaaagtcatttagagcaaaatctgatgtataaaatcagcaatcaacttgagaaatgctaatctgatttttttaattggattaaactctctagaggcattgcacagaggagtgtaatgattaaaagcatatgatctggagtgtaagtggtgagatttggattccagctcaatcatgcacagtgttaaactctctacacctcagtttcctcatgtgtcaaatgggcataaaaattctaaccacatagggctacagtgaggaataggtacatgtcaagtacttaaaggtttagcattaattacttagcatgtattaagtacttaataaatgctagctactggtagacacttcagggaatgatgaggattggagagagggtaagagagcaaggctgtggcttacttaccattgtcaaccagagaatattccccttttcctgtttactcatattgggcttctgaagtaaggttctgtaggttccacagctaaacaaagtttgaaaaccagtaatgaagatatttatttatcaagaggaaaagataatcaagacctattgctaaatgataaaagcaggttggcaaaactgtatattataaagcaactctatttttctttttttttttttttttttgagatggagtttcactcattgcccaggctggagtgatctcggctcactgcaacctccccatcccgggttcaagcaattctcctgctcaacctcccaagtggctgggattacaggtgcccaccaccatgcctggctaatttttctatttttagtagagatggggtttcaccatgttgctcaggctggtcttgaactcctgacctcaggcgatccacccgcctcggcctcccaaagtgctaggattacaggcatgagccactgcgcccagccagcaatcctatttttcgatttatctatattgtctcaaaggatattaccaaaatgtgattattgctggatggtaaaatttttaaaaaattttatcctgcgttcacatgttggtaacctgtatttaatattttatgcaataagaatttaagtaaatatatttctcttaggaatttaaagtatatttaaaatatttttgggccaggtgcagtggctcatgcctataatcccagcactttgggaggccaaggctggaatatcactggaagccaggaaccagcctgggcaacataatgagtccctcatccctacaaaaaataaaaataaacattagctgagcataatgacatgtgcttgtagccccagatacttgggaagctgaggtgtgaggactgtttgagaccagaagtttgacsctgcagtgagctatgagctatgattgcaccactgcactccagcctgggtgacaaagtgagaccttgtctcacacacacaaaattttttttaagtcttcatttttaaatggcaaaagccaaaataaaacttgcaaagttaatatttaagctgcgacattaaacaaaaatttccttaaataaattgttctattttatcctagattgtagatgtaaatggcaatgttctacctcctggacaagaaggagatattggcattcaagttctacccaaccgaccatttggcctttttactcattasgtagtaagtgacttactaaataatctcattttctatttatttctcaagtgcttggtaacaatccctgtttgccacaaaacatacctaggataggtacttgaccctttcttgagagattggttgtcctgaatagtaatccaaaagacaagaaattgaagaaatacycaaattcttgctgaagaaaagcatgctggtcccctgaggccagatcactgttccaggtccacgaaggcaagaggaagggaccctagaaagaggacagcctcttaacatcccctgatcctctcaattatcaaacaaaacccactcattttcctgaaatccagttagtgctctttcttttcgggaagagtgagagggacaggggatgcgggggtggtgggattaagcaaatgtctttcacaagaggctttctaagctccttactgtttacaacaatattttcatctctaatcacagtatacaaattagagcaaagtctctatcatataataaaagatccagatgctacttgccagtgtatttgatataatgtaacagtatcttgttttttcttatgtcagacttgcagaaccaattctattattgtgtaaaacaaaacaaagcacaaaaacaaaacaaacctgtctgctctttattaggtgtcagtgctttcttttgactcttgagtatttacttctctcttttcctaccagcattatctattaatcaattagcaaaagacttaatttagtttactcctctgagctactgcaatatttattttgtaatctatctaagaaaaatctcaagatggaaacatgactaatctttgtaactgtagtttacctttcttctgtcgggctagctccatgctggaatttcatctttattttcacaatctatctcttcctaactctaatgcttctcaaaggagccaaacttttctgcttccttgaacatttaaaaatccaattgagggccaggagcggtggcttatgcctgtaatctcagcactttgggaggccaaggtgggcggatcacttgaggtaaggagctcgacaccagcctggccaacatggggaaactccatctcaaccaaaaaatacaaaaattagccgggtgtggtggtgcacgtctatagtcccagctatttggaaggctgaggcaggagaatcgcttgaacctgggaggcagaggttgcagtaagccaagatcgtactactgcactccagcctgggtaacagagtgagactgtctcggaaaaaaaaaaaaaaattccaattgaccagaagagttggattcaccataacaacaaaatgctatttgttttgcaggataatccttcaaaaacagcttcaactctacgaggcaatttctatatcactggggacagagsatatatggataaagatgggtatttctggtttgttgcaagagcagatgatgtyatattatcctctgggtaactttcttttccatatgtgcatatgtctgtgttaactgatcatcagtgttctagagtgaacctgccactcacctgtatgtattcctgccatatgtgtttctagctatcgaattggaccatttgaggtagaaaatgccctgaatgaacacccttcagttgcagagtcagctgttgtcagcagcccagaccccatcagaggagaggtaaaagaactgattcatgtcaactttataatttgttggcaatttaacacatacttacaaacagtagctcagtgaaacagaattaaccaaatgattcatttactaaatatgcaagtcagatagaaatatgctagtcagaaagaactgctacaaaataagattgaattatgagttgcagctctgatcctaacagacaaacaaaataaggctgaaaatacgtactagaaagaatttgaattccttccgtggtggactagggcaaagatggtgtgaatgccagtaacccaggctcacgtcaggatggggtgacagaagtcagctggatgggatcaaattgttacccagaaggtctggaaaccaacgaggtccctggtgtagtgaaggagaatgggctggcatcagatgtcagaagtgggaaccagaggctggaactgaggtaaccataagcagtcttggtaggtaaataagtagagatttcaggaaataaactctgaataacacaggtgtcctgaaagcccattcctattggggctgaccacacagtattttggcttaaaagtaccatgccaggcagcctcctgcgttttgcctgtgtgtctacaacatgcccctagggtttctctagctgagttacaagttctcacaagtatttcttcaagccatatcccttctaacactgaatccaagttttgaagatgacactgatgtcaatacaaatccagaactttctgtaccatgtattcaagctccttatctcaaatcctaggtatagggcttcaagcacagggcacagggcagagttagaaggtatccaatctcaggggaygaaataggtcctgaagtttaaggcaggccaggcacagtggctcacacctgtaatcctagcactttgggaggctgaggtgggtggatcacctgaggtcaggagtttgagacaagcctggtcaacatggtgaaaccctgtctccactaaaaatacaaaaattagccaggcatggtggcacacgcctgtaatccctgctacttgggaatctgaggcagaagaatcacttggacccgggacggggaggttacagtgagccaagatcgtgccactgtgctccagcctggctaacagaacaagactccgcctcaaaaaaataaaaataaaaataaaaaagtttaaggtaaaaataggagatgtgcatgttacagtggagggtggatctccccccaggactgattcccctaactgatctttgatgccagaagataccctgttaagtcctcctggatggcccaaagttgttccagatatagcccagtggctgggaattggtagtttgtcaagttgctaggatgacaatcgctatttactgtgaaagggtatattccaggcagctgagggcagggaaaacagtcagtgattattggcttgtctctttgctctgaacatcatcggcaaggtttcacgagtcttagctcttcctgtacttctcccctaccattagtcatcatcagttttacccacctagacaggtgcttactagggacaggatggtagctgagcctttcggaacagggttagcttggcagccacctgatatcctagcgtacaatataggaaaggtctataagtgggttgtggtcccctcacagctccgggggcttggcatagggcttggattagtcagagtgagggggaaagtgtggccagttttccaacagtggtaggctgcagcatttcctagtagaagatgtgagtgggtatctcaaacgaggtatccatgaacaaaacggccatgtgctccatgcctccctttctgctgccaggcctattctacctgggttaggtccttctctaggctgggtcctgccaggcagggtaattgggtagcaagttccagaattgattaaaaagaatatttggatttgaaataccattttaacattggaatgtgaaagacttgtggaatatgtgtctagatcactaggttcttaaatttttgggatcacatatctctttgagaatgtgaagaaaaccataggccactgttaagacttatgcagtgatggaaatgttctatatttgcaccatccaatgcgatagccatgcatggctatcaatcacttgaaatgtggctagtgtgactgagagtatttaatcttatttaattttaattgatttaaattgaaatagacacacgtggctagcagctatcatattgaatggcacagccatagacttttctcagaaaaatacaagattttgcatagaatttcatagagatttgaagcccacttatggattctgggttaaaaaataagacccaaacttcttgtaattctaagactacaactaagagctaatgtttttgatgacttactatgtgccaggcattatacatctatgctaattcatttaatcatcataatctcttttacagagaaggaaactgaggcacaaagagattacctaacttgtccaacattacacaacaaactgtgacttgaacccagctgttctgacttcagagttcatactcttacccatgttaggttgttccttgttaatttaacattttctgcagtagtttaaaaagataaaagagactatccaagttgtagaaatcgtcaatatgtgaaccagtattgcagtttttaaaataatttacctttgaatgactcacttacaacaagcataattttttaatttgtaaaaatgttaatgcagcagagctagcataactacaaatgcattttataaaatgtcaaaaagtgaatggaacaaaattatatccatagacacacacacacacaagggttcacaactgccgcatggcacatgtaaattaaaaatgttcaagtgttgttgttgttttttttcttagagacaaagtctcactatgttgcccagtctgctctcgaactcctgggctcaagcaatcctcccacctcggcctcccaaatgttggcagtacaggcgtgacccactgtgcctggccacaagggttttgggtaaagacaaaaatgggtaattgttcatacaatgtaaaactgcccactggtgaacagttttcaatatgtgaaaaaattataacttcaagtctttgtttctcaccaaatggctgtcctggtaatttgttgtttcaaataattccttttcaatgaaatctttactcccagatcaaagtggataggaaatgttgccagcttatctttaagctggacaaacgaatccttgaatttaataagatttcaggcacctaagtgcaggatacttaatcataaaaaagcttcaggggactctcctggaactgtgcctacagggaagcatcattccatagccagctccgggctggtaatctggcgttggaggtacatactagttgatgcacctagactcatgcctctagggaaggcagtaaatggcagtcctggtagtgccctaggagagaaaatgacaggactccaaatttacttttaaagggggctatgagggatggcctatctttctgtcttctccattacaggtccaaaaactaggcagagttttcaaaaacatttctaggaaggataaaatttggagaagaggatttgtaagcataaagtaataacatctttcttggcttctgccagttaaaggccaccatgatttccactcttgttcctcagggccatggaaatggatcagagcaacaaaaaaatagctgctggaatcttcacagccttgtataaagactgcatgttctctgtgaactgttcccttcaacaaagacatggcaaactcagcgtgactactgtttataagtaatcccccatgctgagggctaggctggatgaggctgggttgttacaggggtcccagaagctctcctgtattaggtacagaccaggaagtggctggcttaagagcacagagctgggatcaaactttattaaaacacactggcccaccccaccaggcatgtagattctcagagcaagcaaacaagacatactaaaacatacaaatgcataactcattttcctggtgtttcaaatatttattttaggtagtaaaggcttttgtcgttctaaatcctgattacaagtcacatgatcaagaacaactaataaaggagattcaggagcatgttaaaaaaactacagcaccttacaaatatcccagaaaggtaggcatcctaattataacgaatatttgctcagtgttgtggacaatttcaagtgtttatttttacattttaatgaatattttcttcacacatgctgcaccacatgtcccaaactgaactgatgacatatgggtaagaatcagaatctttgagattaaaatgaaaccctgaacctattttgtttggtcctttggcttactggactcacrgtaaatacttaatatcaagacaactttcctaacaatacccttttccctattttggctgttacccaaaacccattccaaagactattctaattcttccacctagaattcataatcaaactgctatataattggctttatgtaaagataaaaatttccaggctaattttcttccccttgatgccaacaggtagaatttattcaagagctgccaaagactatcagwgggaagacaaaaagaaatgaactgaggaagaaagaatggaagacaatttaaagttgtttcattaattaccatatctataaaacaaacatagtatctgtcaatctctagaaaccacaagatgatggagaggtcataaaaactgtggtagtatgcttagaaactgttgatttaaaatatcttgtggttatgatatcagaggctaaattttgaaataaaatatttggcaaattcctccacattagtgtcaatgttcctatcatttcttaatataaaaataataccatcaattgctgattaatttttaaatgtatagtatagaagcagtttctgaaccagatctctgctacataggttttcaaactttagttgactaattcttctgatatgttgatatacaaatcagaaccaatgttcaagcctgaaataaaactaaagaacttataaaagtttttagaaaaatataaaatatcagttagaagattatgataatctcaaagtacaagaatctacctgaaaatagactagggatttttattagtcacattttttgcaaataatttaaaaatagtttagacttgtttcaaggtctaactataaaagaaggatcatatactattgttgcttattatatgtaatctaataaatactgtttacaaaagattacacttgtggttcctgaagaaagtatggtaaatgcagtaaacattaatatataaaataaaaataaaatagtgtaagatgttatcagaatactcatgtttggaaattcaaggaacaattaggattcatacatgaaaggttatcaattcctcattgaaggcctgagtctcaaagaatttttggtggaaatacttaaatttctgtcacaaatatggcttgtttctggagaactaaaagtgagtccccctgtggaatgagatggaaccatgctgttggctctttccttttgaagtgtttgttcccatttgaaataaccacaacattttctgttttcttggtatttcccgatagggcaacaatagaagacttttccatggttcggtccattattagaaacaacaagtctcttagatctccgaccacacttgcataatggaggtgtcattttcccactcttccatggctcttgtaggttaactgtagaagttaatatagatgggagacgcctccaggaagaacttcttactggggagcaatcagatgatgtaggcttttcttcatgaatagtgaagggttgtttttttgctggtgggaaagcttggggactgcatggattccttttggtaccacctgaaagaagaggatgtttccccaaaactaaaggatgagacatattggcattaactctgttgaaggtacttgatttgtgttcaggtaacttaaaggcagaaatatctgaacctggatctttggcttcttttacattataaatagtagtgtgaggactcttgtacacaatagacttagaagtctcagatttttgaggagtttcctctatgtctccaaagttttcatgacttgacatttccaattctttcaaaaccattaatctttctccagaattaaatgaaatctctaagtctgagtcactaatgggaactgtacagtctacgttttcctcaggctgagatgctggcagtaaaaccacatcctcccaatcagccaacacaggtaaacagtccagagtagagctcatttccaaatcagaaacatgatgaacagttggaacggtggtagaaacaagtaccaattctgaaccaactgttgaagccttagatttggtattaaatgcaagatgttcattttttccttgcttttgcatatagataggtgaattcaaggtaggagactgcaactgccccacagaagtagaggacttagtattaaaaagaggtaaggaacttttgacattgtgaagacttgcttttatattgttttttacttgtaattgatcctgttgtgcctttataggagaatttgcacaaattgacttcatttgaactttttcatgaggatttattatatttttaggctccttattatatatgctgggaccctggatgctaatgttacaggcagacatttcttcaacttgaattgtattcaaatttctggccagaatgctgaaattcttcttagtgggaacctatgattccacagacaaatgcaacagctttagaaactgtgcattcgttaatttcttcagtatacagttttatgacaaaaaagagaaatgtcattgatttataaatgactgcacacattaaatctacgtttcaaagaacgtatgactgtttatgaagtttgagatgacagaataaaaaggcaagacactactaaccttgttcaacgaccttgtaattttcattacacaaccatctctgatcattttccaagcaagaagggcagtattccgagaatcgtccaaccctgaggatacagatatcaaacactgaatttagtggtactagtactatttccttagtactaaagaaataacttaaaaagaaaaacaccacttgtgtagaaattggaacacagttttagttttatgaccatctactaattttaatcatgataaactggtcttggaagtggaaggctatggcagcattaccagtgaaagacaagctcgtccacatttatagaggaggatatgaaaatgtattagacagttccccaaaatgtggccagcgttctgcaggaaccaggatttgtgaataatctaatagtcttgttcagttttttcactagtccattctattatttgagcacttgtttaatctccatttgatttggctcattcttttcattcttcttagcaactagaaagccactagatggcagtgtatcttacaatagtttatgaaagtggtaatttgaaagtcttagaaacaatgtgaattgtttagattaggagttttttttttttaggctgaagatatcccttactaatgacattaccaaaaaatgaaattcatatgaagtattttttaaaagtcaaatggcttacataatttttaatgtatactaaccagaatgttctcgtcctgagaattctattcctacttcctgcaaggcaccacttagtccttttggttttctcctatagaaaagctaaccaataaaaaaagatatatttaaaagaagattactattttaaagactatgtattaaacacttttcataatttttagttctattagatttagaatgtgcttattttttgtgtgttgtttttaaatactttaagaaatgcatttatgtgaccagtacaaaagaaagtatcttctttgcagaaacccatgcccatgtgtaggataaaagttaatcatttttccatagaaaaaagtaaacatgcccccattttttaccattaccttgtaagttgctctgagatcaatccaagaatttaaaaacacaggttttaacagctgttttcttttacactcatactccaggcaaacccccaagtcccagtctgcattaggtacattaaaatagaacaaagtcaatgatgccagcattttttacttatgctgccaccatttacaaatagaatgctagaagatcatataaaatagaacagtatgatttcattgctctgctaatatctaaaaattattcactttatataacttactattaacaagttaggttgatgactaaatttcaaaatgatttcttaaacacccagtaaaaccttatttcagaaagaagagtaacatgttaaattacaaggactatattttctatattctaggaaaatattaatgttattgagaaaccaaacattttatagtaactggaaaccaaatatgactatcaatgctatcttatcaatgacacagtattgctattaatgactattaacagcaatgctctaacacagtcatacaaaaaacctactttaaatggctcattttttttttcttttaagtgtcaaagcataaaagcaaaggatgttgagctgatgaagactgtagaaaatagcataagagtgttcactaaatcatctttgcttaattcttaacagtggaactctagaaacatttttttaagttcaggcttaatattttaaggtatcccaaaaggttaatttaaaaaatatgtattaatttacttttcttggctaacatctgctaggcatttaaattttttttcctagcccagaagattaacaaacataattctaggttagcaagtataaaactagaaataaagaattacatagtggtaatgctacccatctgtgattaataggtataacttattctttacctgaccaagtaacaaatgcacataattttacttcagaagcagaaggctctgaaatcccagtagcaaaaataatgttcttctgttgctgaatcttatgaatccatttacagaactgagataagcaaatcttcagagggactccttcatcaacttgagcctgagtagagagtcacaaaagctgaattcaacaatcaaattccattattatttagcatgttttataactgtggagaaagattaatggttttaaaagaatcagaaatgccaagtcatgaaaacacagtgtactgtgggaagacataacaaagtggttctaactggcaaagagtttatttagtggaaagaggtaaaaacacgtgggaaagaaagaatatttagaacccaccaaggtaagaaagattaggttgataaaaactaaaatcacacagaaatatgatcattaagtccagactgacataaatcatagacaaatttgagtcacttaatttccataaaatcaatttgatcctcatttttataacattattcttcctttgctgtgtatttatttaatttttaaaatttatttttttttgagacgaggtcttgctttgttgcccagggtggagtgcagtggcatgatctcagctcactgcaacctccacctcctgggttcaagtgagtctcctgcctcagcctcccaagtagtgggaatcacaggtgtgtaacaccatgcctggctaatttttgtatttttagtagagacggggttttgccaagttggccaggctggtctcgaactcctgacctcagatgatccacccaccttggcctcccaaagtactgagattacaggtatgttcctttgctttttaaatcgagtcctgaggtgactcacgcctgtaatcccagcacctcgggaggccaaggtgggcagatcacttgaggtcaggagttcgagaccagcctggccaacatagtgaaaccctgtctctattaaaaatataaaaattagccagatgtggtggtgtgtacctatagtcccagttactcaggaagctgaggcatgagaatcgcctgaacccaggaagcagaggttgcagtgagccccgccaccttactccagcctggccaacagagcatgcctttgtctgaaaaataaataaataaatacataaatcgagtcctgaatctggaataacactaatcttatttatttatttacttatttattcatttattttcagagacaaagtctgtcacccaggatagactgagattatacctccctgcagcctcaaactcctgggctcaagtggtcctcccacctcagcctcagcctcccaagaagctgggactacagacacatgccaccaagtcaggctaatttaaattttttttttttttttttttagagatggggttctcactatgttgtctaggttggtctcaaactcctggcctcaagcaattctcgaacatcagcctgcaaagtgctgggattacaggcataagccatcatgcctaacactaaataaatctaatttcaaatggtataataacttttattttctttttgaaactgacttctgaattttaagatttgcatcatacctgctttatgcctgtcaattccatgcaaaattctgaaagaattggatgttcctgaggttgaacataagcctggaactcagagtcaatctgtccagttgatgtgttcagcaacactgctggaaactcaactaaatgaaagaataatcaattgacagttgaataaataatttttaaattaatcctgtaatcatcctaaattaaacatgttaccattttaattaaacaaccagttttcagtaaaagcatactaaaatgaccaaagcagtgtgacataaaggttataataaagttatgctaaagtcaaaatattgaagttatgagcatgttgtcttaaaagaaaacaatataattaaataaatataaaaaccatatggaatataaaatttactttttttgcaaaggcatttttttcagtttctatgccattgaggtgttgtatgtaatataaaacaactattttatataataacacatttaggtatttgagattttgctcttttttattcaacataagttttgcattaaactaccaatgcatagacc

SEQ ID NO: 8802 - DNA, 61177 bp, Homo sapiens
attcaaccttaacccaaagtataaattaaatatccacaagtccttattgatatagtgattaaataaatcaattggaaattaaagacaaatttcccatgtggaggaattcaaataatttacgtagctactccaccctcaaggaggaggaacataactcctcactccataaatgtgggatgtacatagcatttccttccaaagagtgcactatgaaaaaaagggtgaagaaaaacaattaactttacaatggagaaatctgacaacactgctgagccaggtgatcaaagtcaatgtaaatagagataaatcatgttgatattatgtacctctgatgtaatgtggtatcaagaaaatagcactttacctctgtggtattcctcctccaaacttaacaacctcagtcaaatcatgagaaaaataccacaaaaattcactagaggaatatcttgcgaagtatctgaccatttctcctcagagctattacagccaagaggagcctaaagatacttgagaactaaatgtaatgtaccctggatgggagattggaaaagaaaaaaagaattaggtaaaaacaaaagtaacctaaataaagtatgaattttagttaataatatattaatattggtttattaataataacaaatcaactacactaatgtaagttattaacagaagtaactgtgcaggctatatgagaaatctttgtgttattttagcaatttttctgtaaatctaaaactgttataaacaataaacctattttaaagtaacatatacattatacaatgtgagaaaatataatggcaaaaaaagaaaatgcaagcacaaactatattccgtctctcagggataataattattaaggtgttcagtgaatattgttctaatcctttttctgtgctcatatgtatgtatattgtttaaacaagaaatctcaaaccatatctacatctgctgtttaccagactgcttcctttacttactaagatatggtaaatatactatatttacaagtttacatatttacatataccaaactatacaaaatacacacttttatagtattattttaaaatggcttcatggaattctgttgaattgatacgccataatttattgaactatttttgtcattaaccaaacatggtatccaaattttcactataccacaaagttccttgtgacaccatttttaatgttttttttttgtgcactttatgcctaactccacaagacactgttattaagagccagtgtgtttctccaccatactttctttgctcttcatcccttcttgcatctcagattttatctggggtcaatttttttctaattgaagcagatttttaaagatgtcatttggaggagtcctttactggtaaattttcagttttagtttttctggaaaatctctatttcaagtttatacttaaaagacatctttacagaatatatatagaatacttaattcacaagtattttctctcagcacattgaagacaacattctaatgtctcctaattttcattgatactgttaataatttagtagttgtctgcttctctttcttcttgaaaataatctgtcctctctatctagttcctttaaatatcttctctctctctctgatattctgcagtttaattatgatgtatctacttgtgtgtatgtgtgttttaaaaattatcctgcttaagacttattgagcctcgtgaatctgtggattggtatctgtgataggcagacaatggctccccaaagatcttaaatgtcttaatctccagaacctgtgatagtctaagttaaggttgtagatgaaattaaagttaccaatccacagacctcagggtaaaaagattatcctggattatttaggcaggcccagtataatcacaaggattcataaaacggaagagggagacagaagagatggtcagagtgatatgaagtaaaaaggattcagcttactcttgctggatttgtaaatgcaggaagggaccacgagtcaaggaatgcaggtagcttctagaagctagaaaaggtaagaaacaaattctcccctaaagcctccagaaagggatacacctgccaatactttcattttatccctgtgagaccagtgttagacttctgacctccaagagtataagacaataaatctgctgttttaagccactaagttttgtggtaatttgttatggtagctatggagaactgatacagtgcctttcaatagttcttggaaattcttcaaatatattccccaaatattgcctttgcaccactcactctatcctctatatctcttgacctctctttaacattttttattttcttattttggtaattatttaaaacaattggcttcttgttccacttcaaataaattcatatttttatatctacatattaagaattagttcataaatgtaattgttgtatcgtatatactttaaaaggaaaattgcatttatacttggatattattatattttaggttttgaaatttctttttttaaatgtctgataaatttattctgatcaaaattaaaatcttattgtatttacagtagtctactaaaagagtttacatcaattctctcctttaaatgctagcaattcagttttgtgtggtcaaagataatttagaatccttttatggtaactgatatgatacaaaggatttttttggttgttgtcaaatttgtatgtgcgtatatatgtatagggggtagaaaatttggttagtgactctattttggaaaaatgaatgttctttttggagttttagattcccagtgtttcaaaccaagtttgcttttgataaggaattcagtgaatctttattttctcgtagagaatttttaaacaatacctttcaaaatattgtatgtattcctatataattttgccttggaataaaaaaagtcatcacattaagaatatttttaacttaagaaattttttcaagattctttcaaaatgctaactccctcattgatttgaaaatacttttagagtttaaactattatgaccatgtagggataacttaaagtgtccttctaaatttttttttcattaatgtcatgcttctttctaagaacaaagtgtttcaatgttataaacagactgttttttcacatagctttcatacatcctgactttctatatctagtagggtaatacatttccttccaacctttagtggggtgaagttcatttgtcttctaatctaagaaaatacgttaactcctgacaayctctgacactcaacagaaacacaactgtactttggaattaatcatccatctttatttcatagtctccttatttatcaatgcaaatggaagtatagcaaatatttcacagtgtcatgtactacctaaggaatttcattgcaatagcattgttttgaaatgtatcatttgattttgatctaactatcatagatcagttttacccctgtatgttcagcctgaatgtctaaccacaatttcacaaaaatcaagggctctgttagttttcatacaaaattgtgatgacttattatgaagacagtcccaattaacaattgcatgtcatctgtaagaaatcaatttttttctcactccccacctgtaattttttttaagcaaagaagaatacttgggtctaggtttcaaggtttatttttctgtagtcctaatatcacttcagtaaattaatctgagactcatttttctaatatgtcaaatgactgttgtaaggattattataaaaacgtaaggtgattaacaaagtatgtaattgttccatagatggcagctcttgtttttttactgtgctttgcttctgccctgcttcacatattatgtaaaatagctggtgagttttaggaggtagtgctcacatgtttgcacagtgtttgctgtggacgatcaacagtaacagaagagcatacttcttcgatacacagagtttactgaatttggaaaggctttggcattcttatgtcatctgtaatgaaacaatctccagaagtcttttctaaaatgtccttgtaaaaagaaaaaagttatgtttatattttataaaaggatgatgttatttataaccagcagaagcagccttatttgaacatcttatgttgaaattgctacttaatacagtgactcataggagctttctagtggaaatcaaatgctcaaatgaaatagaatttagtttgttaggcaatagtgatatgtcttttattggttggactctggaaaacacttgacaacgaatagtactttacccgaagggcacgtatcatgcaccacatagcctaaccacaaacattaaaggtcttgtaactgtgagcctcaaatgaaaatacataaggacagctctcatacaatcaaatacaatacaaactagcttttaatttaaataaatatgtaagtaaagttcaagtgactataatgattttatatccctatgtatgtatcacagaaattgtggcaaactgtagaaatctattcaaatggaaagtaacaaagcactttcacattgccttgtattcaaaatccctactcttcataaaaacttatatttctttaacaaagctacttttctgtttaactcccggaaaacttcgtatttataacttaagggggtttctccaaccaaacaatttatttttgctaggtactatagctatattttttatacaaaatttgtgacagcaaatgaaattctaatcccaatagaagaacaaacaattttcatgtttcgatcttcatatatataattcaagaggaaatatgcttaactttgtagatttttacattttaaattgcattgtgtctgtatcaagtctactatcttttacctagattgtctggaagatttaagctcaaggttacggtttgagaaaagggttttgagagtgaccaggatagatttaagaattcattttatactaaaatatggccataaatatttttaaatacattcaaatagccctttgctggcacattttttcccttctttgccaaaacattcccacaggcggcctaagtcacctcattttataggtttagtaggtttagcaggctttatgtgctctagtagggttagtaggttttgttcatatcaggtctctctcatgggagtttccagggacaaggattgcttcagttagtatggccttagccatactagggtatttgctttaattctacagaagttttctaattaatattctgtagcaaaagaactaagatctggaattccccctcttaatctcttcctagaaatgagattcagaaaggacaggactgcatccagcctgtttgggaactcagacaaatgtgtgttgtcacagacacaaatagaggtctactatgaaataattggcttgctagtgtgctaatgacagacaatgctgatttgctccaacctcatacagtttcacacataaggacaatcatctatgtttcatgaaagttctatctactttaacattattttgaagtgattggtkgtggtatgaattaacagtttaaatttaaatcctaaaattcagtgtgaattttttataatagcataaaaattcaaagatgtccatacaagaaaaattaaaatttggttaggtttagcagagtttgagaatccttactaccctcccacatagtattgtaatgtgaatataggcagttactattacaggcataatgatgattatgtattaagcagaaagaagtatcaccaccagtttttttctttgaatgcccctcagtacttctgcatttataggatggtagactggtttggtttagctctcaaaagtgaaaacatttaaagtttcctcaytgggtgaaaaaaattaaaaagagtgagagactgaaaactgcagcccacctacgtttaatcattaatagtgagcccttcagtgaacttaggtcctgattttggagtttggagtctgacctttccccaaagataaacatgattgttgcaggttctgaagagggtcactccctcactggctgccattgaaagagtccacttctcagtgactcctagctgggcactggatgcagttgaggattgctggtcaatatgattcttcttgctgtgctttttctctgcttcatttcstcatattcagcttctgttaaaggtaagtttgtgttgccttttgctaaactttaatttccatctttggagttggaggcagatacgtgcgtgtgtgtgtgtttgtgtgagtgaatagtgaaagagtttctgactaaactatcttcaaaaccatgtaactttggaatgtttgtgaaagcatggctgagttgaaatgaaaaccaaattcaaatccctacaaacattaagaaaacagatatttcttttagtttcagttcctcagaccagtgtgttcttgcttcaatttctcattcatggtctgtttttaaaagaaggaaaaaagatacccactattgttacctgctgttgttggtcacattgaatgcagctccttcatttgaattgtaaatgaggattttttttaaaaaccgagttcttaaattttcttttagttgcttagcaatgtgacctcaagaagaattagacccaatgaaaaaggcatttgatttgccaaagaattatgaatgaaatggcacaacatatatttaattccgttacaattaaaaaatgatagaattcatagtgaattaaagaaaattaaatttcctgatacagatttaagaaataagacattatctttggaaaaataatgttgctacttacagtttctattttaagatgaaattaattttaaaaatacatatgaattaataccattgaaaaggcaagtgaaaaaacattttatgaggaatggtttcataaaactgttgtgaagtgtattaatatagaatcatgtttcagatcagctacattataaacatcggttttccaaatgctgcattgtgtaaaatgatcactttttagtttcttaggaagacacactgttaaaaaccaattgatataacaacatagcgttatagggaccaattttaaaaccatgtactctaagtaattgatagaaaacaattcacttataaacttataaaacctgttagggataaatgtggcttttgatattaaagtaaagtttgcctcaggattttttgtgtagaaaatttccacatgaggaaaaaaacctaatcttcattattggagcaatagagggttaaatttaaaccaattcacctcagcaaatcacactgtaggttcttgaactaaagaaaatattttcaccaatttctaaatatttactatttaaacatacagttcttacttggacaaaagaaattttttaatgagaagaagatttataaattatatctgactgagagtgttatatagaggacttactatttcatctgccaaataaactgttgagtagtcaaaatatgtgtgatttaaataccatagtatcaaacctaataccataagtattttgagaaaaataattgagacatggtacttatcatgagcttctcctgttttcccattttataaactagaacattgggtgacctcatgttttcaaatatacttataaaaaatttaaggccgggygtggtggctcacgcctgtaatcccagcactttgggaggccgaggcgggcggatcacgaggtcaggagatcgagaccatcccggctaaaacggtgaaaccccgtctctactaaaaatacaaaaaattagccgggcgtagtggcgggcgcctgtagtcccagctacttgggaggctgmggcaggagaatggcgtgaacccgggaggcggagcttgcagtgagccgagatcccgccactgcactccagcctgggcgacagagcgagactccgtctcaaaaaaaaaaaaaaaaaaaaaaaaatttaaatatacacatacactagacaatggcataattgggaaatggcataaatgagaaaatgtggtttagaatattataggtagctacagtttattgtaaacaagcttagtagtaaatctagatttttaaagcttgaaacatatataatttaggggccacttttgagaaaagattacaaaaatatcttactattgcaaaggttactgaaaaagatatggcatgtggatacattgctagggtccacttctggagtctttggaaggatcctgggcaagagagcttaagcttcatcagcatcatggtacgttgcttatgctgatatcataaattaaaagtgtacaacttgagagcttctttacctagatggaataactttttgcattatggtaccatgatttaattatagattctttgcccttgtaacaactgacattaattagcaaacaacttgtgaagagtttaccttaaaatcagtccatttaaaatttggggatcccatgcctcattgcctcaaaactcatctctaaattaccaatgcaactgtttggtaaatcctcagatctgggtggatgttgaagggcaggttagaatctaaagaaaattgaggctgggtgtggtggctcatgcctgtaatcccagcgctttgggaggccaaggtgggtagatcacttgaggttgggagttcgagaccagtctgaccaacgtggagaaaccccatctctgctaaaaacacaaaattagccaggcatggtagcgcatgcctgtaatcccagctactcaggaggctgaggcaggagaattgcgtgaaactgggaggtggaggttgcagtgagctgagatcacaccattgcactccagcctgggcaataagagcgaaactctgtttcaaaaaaaaaaaaaaaagaaagaaaagaaagaaaggaaggaagaaaagaaaaaggaaaattgaatggcagattggaatctgaagagggtattaggattaggataaaagagcacatctatatgatttgctgtgtgaactttctaaagactcaagttttccctactttttcttaattatactttgtcatggttggactattttcagcgccttctctgtgttttccttatatagtatttttaccttctatttaattttgtcacctttaaacctgtacacttccttcatttccagtctttctctcaatccctcaccccacccttactttttagtcaatttttattaatcatcttccagttcttttttcttcttacccttcatcttcttttttaacttctgaccctttagttttctgttgggttcataaatgccattacctatcacccttatcatcactgcatgtctcttcaaacctcaccaataactcagctctgctttgtcttcttgactaagccagttatcagtgattgtactcatataaatctgacaaaggagtatttaaaaaatatttcttgaagattcaaaactaacagttttgttgcttttaagtcacttaaaaattctaaatgcacttgaagggcaaatgaaagagattctgacttttttggctaatattactttctgttttggttttatctaacaacagttatcaaaaaatrttactatacatactctgaagagcactatcctacaaaaggaattaagtcaacaatataaatgggacatgccccaatgcccagtgttgccagatctctgcaaagcataaacagagaaatacttatcaaaaaggaaagtataagaggatgacactctagcacagtccaccttatttgaaccgttttaggctttatctcctgttgaaagaggtaggaaacagtttggaggaataaagggcccattcttttctgtgctttaacatttcctactcatagtcaaaaattgatttattatatggccagtaaagtagaggtaagaaaagaagtgaataacataatagtttggaaagctttggaatttaagaaaggttaccttcctacaaatgtttcgtagttattttaaccagaggacaccttaatatagtccacagaacttggattttggtaaatttaaacatcaaatctgcattatatttgctatgttgggttgaacttggggtcagcttctatctgctgtcacacaatgcttacttttcagaattgctctgaggattagataagacaacatgtatttcctttatgccctatgtggaatttgataggtgtcataaaaagaaggcctcctgaccgaaatatttttcctgaccagaaagcyagtatttgaacccgctatagagtccccaattacaatgcagaagacatagagataagagggaatcccagtcttcatccccttcaaggtttttcctgactctctttgccttctgtgtctcacacctcagtttctgcctgacttggtgcttggacacagcttggttttgtgtatacacatagatcctttcatacttccttctcctggctcttcttgattcctatgaaaatgcttgtcccttttctttgaaggttcgacagattatgtgacttcactacccaaaattctatggcagcgtcccatctcactcaaactccccaaatcttcctgccacccatagrtacctcctttaccttgtctccttcactgtgtcttttacttatttatttccagcctctttggtctccctgctcttcctccattacacctgcaggagccctcctcggggcctttgcacttgctgtttcctctgtgaggggaaggggtagaaagggtaggagttgggggagggggatgcccttcccacagatatccatgtagctcaccgaaaacctttgtccaaaatgtcacctttccacagaggtttttctctcagcatctccattccctttcctgcttcagttttctttatgagcacttctatcatactatataacttgcttatgtactcatttttttattgcccttctccatcgcatttaaatgtaccttccaatttacatttacaaagggtagaaaatttacaaagggtattaaatttacaaaaggtagaaactttgtctgctggttgggtgcggtggctcacacctgtaatcccagcactttgggagggtgaggtgggtggattgcttgagctcaggagttcaggaccagcctggccaacaaggcaaaaccctatctctacaaaaatataaaaattaactgggcttagtggcgtgagtgtgtggtcccaactactcagaaggctgaggtgggaggatcacttgagcctggagatgaaggttgcagtgagcygagatcgcatgactgcactccagcctgggtgacagagtgagaccctgtctcaaaaaaaaaaaaaaaaaaaaagtaaagaaagaagaagaaactttctctgcctttctctgcttgttaactggtgtagtcccagagccttaaaaagtacttactattcaacaggtactcactatattctagttgaatgaatgaataaatttctagctcactgcctaggaatggaaaataattcaacctatagttttagagatatatagtatagataagagcatcatctttagagacagacagcctggattaaaatcatatctccagccagacgtggtagctcacatctataatcactttgggaggccgaggtgggtggattacctgaggttaggagttcaagaccagcctggctaacatggtgaaaccccgtctctactaaaaatacaaaaattagccaggcgtggtggcacacacctgtattactagctactcaggaggctgaggcaggagaattgcttgagcctgggagatggaggttgcagtgaactgaaatcgtgtcactgcactccagcctggccgacagagtgagactctgtctcaaaaaaaaaaaaaaaaaaaaaaaaaagaatcatgtctctatgatgaattacctgggtgaccttaggtaaattatatagtttctgtgtcccctcagtctcttcatctataaaatgagactaataatagtgcctacctcattagatttttgtgaggattaaataagttamtacatgtaacatgcagatgatggatttttgaccaccatttcctctgggcaagtacgtgctgtcatatgtagaggagacagtgaacagattgttactgtgtaggtgggtaaggccttttcaggcattgcaaagtaatttttgctatcacctttctcagctgctttgcttcttgtctagtcaccccaaaccccttttctgtccctctccccatatgtatatttcctgagagaaaaaaagattatggttgcgtgtcatagtaaactgggcaatgcaaccccattagcattgaggaataaggtaaactgaagtcttttttaactatctcctgagagccatacatagaaaatatacaaaagaaaaaagatttatgtgaccatacattttaagtcatctctgggaaagacttgctccttggcatttctttgggctaggtaaactgaattggatactgtgtgaactcattcatacatcagttttcttggctcacagtacagatttgtatactatttgatctttttaaattaccccatgccaactttaagcctgtactaagatttcatatagtaaaacattattttattcgggcacagctaatttaaagttacatatgtgcaacgctgaaatgtacctttgtactaaaagtttgataattacattaatagagtaaattacactgaagagatgtttcttaaatatcaaaaatgtccaaattaaagaacttccttctaaccactaaaactaccttggcattgatctgcttgcatttaaataatacgttaattacgaatggctcatattaaatttatcaaccaattcctggtgggtcctctacttgaaatcatgttcatataattaagagaaatacaatggcatttaaacaaaaaaaaacccaaaatatctatagttcaaccatggcactatcggataagtgattaggaatacaaactaaggttctctgaaatgggagtttatttgtttgttttttgtttgtttatctatgtttttcaagtcaatgatttcagcagatgaagtagcaccatgtttcaatcagcgaatatttaccaagcttcctgagccccactgtggtagagagatgcactgatggtgagacagcatgttcccttacaatgaaaactggatatgtgtcattatctttatgcaggtcacacaactggtctctcattaaataatgaccggctgtacaagctcacgtactccactgaagttcttcttgatcggggcaaaggaaaactgcaagacagcgtgggctaccgcatttcctccaacgtggatgtggccttactatggaggaatcctgatggtgatgatgaccagttgatccaaataacggtgggcattttctaccagataaatgcaaagattagatatcagaagtttttgagaagtgtaccattggacagcacttgtattgggttcccgtttataaatccatttagtttcttatctatcactaaaacaagcagttctatgtatttaaaggttttgctgatgaaaagtgaactgatctttccaagttattgcaacagacaatagaaggtatatactggtaaacgaccagagtatggtgttcaattctatagatcatgttaatagggaagttatactagagtcttttcaaaatgttctgggagagaagggtcaataatccatgttgtatgaaaaacaatttagaccactctaactcaagaggagatcagttaggaggttcctgcattccttgatacaacaggtggaattactgaagagagagtaaacctagtctgtgttcttcctgaggaaggaaccaagtactcccctgaataacagtgtttggtcagttaaaatggtttagatttatgtgytgagaagggaggccaaattagttggtctctggggacttttccaattgtaatatatggtgattcccttatttgcttctcaagaacctaaagataatagattccttgagtaaagtcagttattcttctacatcttggtgtgaaacaggtacacaggacaaagtacttggaacaagtagttgctggtgtcctttatattgaggtgtcatagcaatacatttacaagtgatatttgcttctttgggtgtctctaattgctcttgtgttttccaagttagatctaagcatcatcatccatctctctgagccatttctcaatacaacagtaaactgttctccagaaaacattatattcctccttattcagtaattagactttatttttatttacacagataaggtagaatagggcaggggtcctttccaacaagtggtaaagaaagtgaagtgatcaggtagacagcaaccacaaaaaacaaatgaagagtggcaatgataggaaagaatcacactcaagtcacaattattttaagcctaaagtcacagagttctttaagtattgctatttttgccttattaaaaaacctagtttttaaataccttctccattcttttaaagtgagtggcaaggtcctataaatcatgaattgaaaaatgacagaagaaattgtggccaactctttctgtttctttatcattttattttcagagatactctgatgaagacagatataggaagttttttttaacagctttctttctgttactccagatgaaggatgtaaatgttgaaaatgtgaatcagcasagaggagasaagagcatcttcaaaggaaaaagcccatctaaaataatgggaaaggaaaacttggaagctctgcaaagacctacgctccttcatctaayccatggaaaggtaaaggggcgtttagattccacaactttttctccaacttcatatttttcttcccttcagtagatattattttgaggtaatcacattgtaactacttttatggtaaatggaatttcttcaagaactaaagaacagaggttgtaaattaaatgtttccaaactgaatcaatgccctgagttcccttacatttactagccaatttgtttcctatttttctggaaatctttatagtggaatgaagtatttatttattgatgaaaggcattattaaaaggtaaatttctcatcaaattataagggattacaaacrtaatgtaacaaagcaagtcatcaaagcatgattggatgaattyaggaaaggagacaaattatgagactgaaatgatccaactgagattagtaatattgatttgttatgagattatcgatatctggctaaagtacaaggttaaagattttaaragggtatgacaagtctaaagtagagtttttttaaagcctttagaaattattttaaaactatgacatggaaaagccttttatatattaaaataatgattgaacactttataatatatatttgaaaatctgttttaaaaattctatgtgtgcattacttatggcttgattctagtcaattgaaatggtctwaataaatttggaattgagaaacaattgtgatcagttgattattaggcattacatatttgtgtttatgaaaattacagatagtgtgttgacatacataaaaatgtgtctaaagatgagagctcaattttaggaacaaaagcaggaaaacagaaagggaacattgagttataattccatacgtctctgaaatttcactttctaaattcaaaataaagaaaaactgatctttatatactgataaagtaatactttatttattttcaactgaagtatttgaaaacaaatactttggacatttcatatatgtatattgctaatcatgatgcacatttttatatgaagttctaaaaaggaactcacaagaagaaatcttgtgttttcacctcgcctacaaccaaatatgaatcactatcttcaagaatgctttctcttccttctttacttgtcaaaatacttgccatgtttctgactgctcacatgccatttctgtcataaagttcatacccttccagccagctggaaataaccatcactctttagaatgctcttagcactttgcagctcactcatgacccttatcactttgtttttggtcatttgtgttcattgctagattatgggtgttggatagaaaaaaatccaattcctctttgtatttcagcctctccccttcacctccatgcccttccactccctccttccccaaagcacccagaattatgccttgcactgaatattttatgaagccttctccgacatctttccaaacccctgggcctatttctgtcaaagcgtttatcacagtgtattgtcactctccttttatgtcttggctctccacattcagaataagtttctcatgggcagagttgtatctgtctattcagcaccttgctcataggggatactgaatatagatgcttctaaaataaaggataaacaaataagattatatggggctcaactgagttgaactttgataaaggttttacttattgtttacttaataatagctaaaatgaactaagcacttactgtgtgctaggtgctgactaaaggcattacacgaactgtctcttttattcttgtaatggccctgagcagtaagggctgccttatcaacctcttgtgatagatgaggaaccaaagttaagaaaagttaggaaatttgcctatggtcatacaactggcaggtggtggagttgggacttgaaatagagtctatgctcaaacttctatgcctactgtcttccagctggaaagtatttggagaaatgcctgcctctttggttgacttgtagtgttccttatttacatcatgagatcagttgacttatttgattttcttatggctcaactttgttaacaacaagaaatattgttattttcttctctgagcttccaatgtggcaagacacttgagttcatagatattatttgcatttataatcttactgacaaccaatcattttatagctcctttggtagcagctgagtacaaagtcttctgctacacacatgaaaggactcagtaccctcactgttcaaaggctgggatggaactgccacatcattattttaataactgcaatgggccaattctagaggagctatgatttgcgatgatttactgtaaccacaggttaaagtacatcattgtatctttcaagtatataataaaatatttgttggaaaaaacttaacaatgaggactaagaagccaacaggaagttttggccatgtcactgtcagaaagatcattacttaaattatcatttcagtttactatgagagaaattatggacaggcagagtaaggctatggacaggctattttcttagagagcattttctaccacaggctcaaattaagttgtgctcctgaagtttctgggatttcaaggatgctcatcagcatgtaatttttgtccttccagacctccccctgtctccctttcccatctgaggctctcatatttacattttaaaagagagtccattaaaatacttagatacatattcattgcacatcttcttttttccatgcccactcatcttccctacataagtgggcataactctagttttgtctacaaatcattaagttgtaaacgtgacagttatctgattacgttgattaatgctgacgagtgaaagatgcctcaagttataccatggattcttttttaggcctgaaatgctgctccaattaactggataattaccagatttccatttctggttttggctttgtgttgattaaattaaccacgtggctgctgagtcagacctttattttgtattgtttcygggcattgatttgctctctaaatcascatggctcttgtacacacactgaactgccacaagaaatgtgacaccttgaaagtccttctgaaatttgttgtatatttctttacttgtttgttctccagtgtgtcatttcctagccatgctctgtcttagatagatatcaaagataaaattactaatctttgtttgctgggattctttttattatttttattgtttggccacttaatggaatttagtctcctcttattcytaaaataaatataaaggaaggtgtggagaaaggcatcttcttcctaaggaaaaaacaatatgaatgatgcctacctatttcaagaggaaactggcccctcatatttggctggaagaggcactgtaccaccttcccagccattttacccagtctccctctagctgtggtttccttgggttaaagacttcgtttgtaaccaggtcatacctgctgctgctctttggaagctctgagtactgtaaatttagataagaacctgtgctcttggatgttcagaactaatttcattgctgaatgaagtaatcaactttatggcctgagtataataaaacttactcagttcctgttgtgaaataataaatttaagattattgctgtgacagccatgtggcttgaaatgcaaaattctgatttcagattattattttttaaatgattacaaggcagctcaattctaacagttttgacatttagctggtatggatatcagtactatcttcactttggatctcatcagtctacactaaagaaacagaatttaggccctagaagtagcagtcatataaaagaaaaagagatgtgttcatttttctagttctggggaagcaataaaaactaatagaaaggattaaaaaaacttttttcattgtgtytcacagtttatrtctatcattcagcctgccaggagggaaaaaaggctctaacaccattttctaagggatccagaggtcaagatcaaaacttgatccattgcagtgggtcagtaacagataagcactgaaccttatgcacagtccaaagattaaatccaagaactgggtttccttaccttttaggtaaaactttaaaaatagctcagatacattttgtagcctggaaggaaagtgacatagtggtgacaatactggtatttttcccacttaggagatcttgctttctaaagtatttaaggttcataccaaaaagacatgggccatatagacatgtgtgcattgccactgagtgaacacttctgactattttggggcaatctagttatgaacttctaatggtcatgatacctggagatacacttccaaatatttgaaaaggaaattacactgtgattattagaggaaggagatatagtttacaaaatagaacttcagaaactcaggcttgggtctgagatattgccagtgatttgtttgagaatatgatactgtgaattttcagacactgaggtcattattccagttcctttctaagtcggacaaacactattccaacatttataggttagtccagtctaatgactaaaactgattgccagataaagtacctagtaaatccatcactaggcagagtatatgtaggaagtaaaaatagagatttgagacacttgtttggataattcaggaaaagtattctcttcttctaaggcacaagataattttcatgtagactaaattactgagcttggtattatttggattcattgcatagctattgagctttatgttttactttagaagctatggttggttttaaagagtactaggaaggcattcaggatatttctggtagaaatgctcagctataattatcatagaccttgggaatttttacagggaacatgtatctatcctctatttctaaattgtgtgatgcatatcaagtctacagggtgaaaaccaacaagctgattttcattaaattcactttgtacttttatccttgtttcttaaacattagttaaattatcaaaatggcaaaagacacttatcatctctgtgcctataaatatcaaagatgataaaacaaaactaagtggcttactattcctgccaaatcatagtcaccctcctcatttcaacctcctttctctgccttctgatggtaacctcaaagcagtgcctggggcaggttatgcagcagtagcaatctcaacctcaaattttccagccttctgaatatatatatacacacatatatatatatgttcatatatatacacacatatatatatgttcatatatatacacacatatatatatgttcatatatatacacacatatatatatgttcatatatatacacacatatatatatgttcatatatatacacacatatatatatgttcatatatatacacacatatatatatgttcatatatatacacacatatatatatgttcatatatatacacacatatatatatgttcatatatatacacacatatatatgttcatatatatacacacatatatatatgttcatatatatacacacatatatatgttcatatatatacacacatatatatgttcatatatatattcatatatatatatattttttttttacccaataccaatataaatgctctggagggtggaaaacattgcccctgtgaaatgttgaccatgggtattatggccatgcctggggccttgcaatagcccataaaggctgtgccatctcaggaatctcaaaggtagtgattgccattttcgtccaagaacttttttatttgctattattttaaaccttagttattttttgtttcaagtacagttacaggtagagaacatgctgacatgttcaaacagaatkttcatcatttctcttccctgggccatccttgttttcatgaggctcccagcctatatcagtgctctctcccaatgctgtgcccatcatgcaagagccttcattatcggtctccctaaacttcatattctgatggtctcagagatttaaatagcttcttttcacaaaaaggaaattccagatttggagtgtcagatctctttctcccaggattaatacaggtaagaatctgaccttgcctgacacttatttaaatctgataaatgatgcatttttgctycatttgtgttctgttcccctctccccaccaggtcaaagagttctactcatatcaaartgaggcagtggccatagaaaatatcaagagaggyctggctagcctatttcagacacagttaagctctggaaccaccartgaggtacttaccaatattaataaggattcagcatctcaataaaatttgtaaggatttctacttayacaatttcagtagaagagttactactaaggtaatgctcagaaaagrtgacttgtgtagtgaagtcgcatttgcctatgaaacaattgccatttatcccaatgttttgttaattaattacaaggtagagaggattagaaatatttatactaaaggagcttcgtggggatcattccagtggttcccagatatcactgtgcaccactgtaccatggaggggcttgttacaaatatagattccctatattcatcccagagattctgattcagtagatcggggaggaccygaacgtctttttttttgagatggagtctcactctgtggcccaggctggagtgcaatggcgcaatctcggctcactgcaacctctgcctcccaggttcaagcgattctcctgcctcagcctcccaagtagctgggattacaggcgtgtgccaccatgcccrgcttgtatttttagtagagacagggtttcaccatgttggccaggctggtcttgaactcctgacctcagatgatccacccgccttggcctcccaaagtgctgggattacaagcatgagccaccgcgcttggtcaaacatctgtattttaacagtctttgtggattatttggatgcattgtcaatgtagggaaccactggtctataccaacactgttcattttgcaaaagaagaaactagagaagttaggtggatcttccagtatcatacctggagtcaaggctggagtccaagtttcttagactgaattcaaccagcccatgagtgggtgaaaaatctgatggtagggttggaccaaaagaatgttggttagcttgctagaaaagagacctctgcttctgtgatgctggcagaggccccaggaaaaagctcagagaagctagacagagtctgtattgggatacatttgcctaaactcaaactgatgatgtagctaatgatgatttgagttaatcccagtggattttaattaatcccacaggattttaagaatttctaatcatgttcagctagttgaagttacacacacacacacacacacacacacaccacacacacacagaatctagatacagcattaacaatcaactcccttgccacagaattacccatttatccaaagtttcaattattaccaggccatttgtctaattttaattggatttcgagagaagtaggaaatcccacattatttgtgaaaaaaaatgagaaggcgctattaagacactcaaccaaagagaatgggagggaatcaatgagctaccagaaaccttgttcttgtctttgtatcttatcatcctgggggagaaaaaaagtcccctatggcctattagagacctcaattttcaagccacttctcactagaattcaaatggccyacaaggaatcccaagcattatgcccttgcctttctttttagrtagatatctctggaaattgyaaagtgacctaccaggctcatcaagacaaagtgatcaaaattaaggccttggattcatgcaaaatagcgaggtctggatttacgaccccaaatcaggtatgatagatgtcactttctttgaggcattaaaataattacattttgtagagactaatttaatgtaatagaaaaataaagtagaaatagaattttgaaacatttgtaatttttagtttaggctacaaattcacacatatgtaatgaatagacccatttcaattgttgtaggtgttagtaatgagggatgggtgtaatggggaagctgtttgtagactgaaagacagtttgctatttgacttgattcaataatttaaacgatgattacttgttataaagatggctatttatttatttaggtcttgggtgtcagttcaaaagctacatctgtcaccacctataagatagaagacagctttgttatagctgtgcttgctgaagaaacacacaattttggactgaatttcctacaaaccattaaggggaaaatagtatcgaagtaagataatgctaaaatttttattttctttgctattctttgttatattattatacttgatttgtaaatagatctgtgtttgtgtgtgtgtgtgtgtgcgcgtgtagtcatgcattgcttaacaatgggaataagttctgagaaaagcattgttaggcaatttcatcactgtgcaaacatcatagagtatacatacacaaacctagatggcatagcctacactacattatatggtatagcctattgctcctaggctacaaacctgtatagcatgttgctgtactgcatactgtagacaattaaacacaatggtaagtttttgtgtatctagacatagaaaaagtcagcagaaaaatacagtataaaagatactatgtaggtgtacctttattcataaaaggtacataagtgaaatttgcagggctgaaagttgctctggatgaatcaccaaatgagcactgagtgaatgtcatagactaggacgttactgtacactactgtagactttataaacactgtacacttatgctacgctgaatttctaaaaaacttttttcctccatcataaattaaccttagcttactgtaatatttttacgttaaaaactttttaatttttgttaacttttgaastactctgtaataacacatagtttaaaacacattgtataggtgtacaaaaaatattttttctttaaatctttataagcttttttctatttttaaattttttatttttatttttttcttttaaaaatttctggttaaaaattaagacataagcatatatattagcctcggcctacacaaggtcaggatcatcaatatcactgtcttcctccagtggaaggcacttacaacctccaaatgttgtctcactgaaaggtcttcaggtgcaataacatacatagaactgtcacttcctctgataacaatgccttcttctggaatacctcctgaagaacctgcctgaggctgtcttacagttaatttttttaataagtagaagaagtacactgtaaaataataataaaatgtgtggtataataaacacagaaatcagtaataatcatttgtcaccattatcaagtattatgtattgtacgtaactgcacgtgctatacttttatataacagtagcacagtaggtgtgttaaccaccagcatcgacaaaaacacgtgagtaatgctttgcactgtgatgataggacagctatgatgtcactaggcaagaggaatgtttcagcttcataattttatgggaccacctttgtacatgggtccatcattgaccaaaatgtccttgtgcagcacatgactgtatttattgtgcttcctcatttcaactgtgagctccttgaaaatagtgattatatcttgttcatctttattttttacatcatctacaacaattcacggcacatggtaaataattactttttaaataaaattgtattaaaaatcaattatttattgaacaggttttaagttttaaaaagacaaactacttgattcattctagttcattttctaatttctctgtcaaatgtttttaatattaaggtaaaaaagtggtagcatttgtaatttttaagagtttttaaaaaaaattgttgttaaaaaacataaaaagttccgtagtgaagagatgtgacaaaatttttgatatgacttatgcaacttaaatatttaggcctgtttatcatttgaagaccattctctggacagaattgttctaacaggattaagaactagaatgttaaatcttagagtttctgttattttcagattttaattcagaaaacaatgttttctagcagtgaatgtgttataccttatgccattgcttctcaaaaaatttctctggagtagctgtaatattagcaccaaatagatgcaaaatagtagtaaaaatgcctgattaaaatgcttgaaattttatagaagtctcatctggaatagaattttgcattctacttcatatactactggtatatctatagtgttttattatattttcatataaaataaatattttaaataacttatcaggcctatgagatttccattgctatgtaacaaccccagatttagtggtataaaatgcaacaatcactgtactgttctctgtcataatttacaggcttgccttggccttgctaggcatctattatgtagtttcagacagtcaaactattcaaaggtggttcccccatgtatctggtgcatgggctggaaagactcaaacatctgaggctcctcatgcaactatctttatttccctgtcgcctctcagcattgcagcttcatgtcagacttcttatgtagtagctcaaggctccgaagcacatgtactgatagtgtgccagagaaaagctgaattctcttttaagacatagccttagagatcacacagtgttactttcagtctcctctattagttgaggcagtcacagagtcctacccaggttcaaggagagggatgtagaccctaccttttgatgacagacaggttctggaagagcatgtcagacaaaaatagagttgagactatttttggaaaataagattttctagctgtcttggttaataagtaacacgtggttgtattgacgatatcattttcagaaagctgggctaaattcaaaagarctgacattgcatatcttattcatcatccaggcaatttttcttccctgtatactgttgaaataatattttgaaaatgcaaacttaaattttcaaatcttttaatataattgttgcyccagaaagacttcataatgagctttcagttacctctggagatatcacagtttkaaagacrtggctatatacaacttgaataaattactatcttgtttgccaaaagaatggcaattagtatcttgttcactcaaaagaatgattataatatagcatttccctttggtattatgcaggcagaaattagagctgaagacaaccgaagcaggcccaagaytgatgtctggaaagcaggctgcagccataatcaaagcagttgattcaaagtacacggccattcccattgtggggcaggtcttccagagccastgtaaaggatgtccttctgtaagtgcagacaaatatgggaataatcatgacatcagactctgttttcattttgtctccagtgaaagcatcaactcattcaatgaagacagtttctaaagaactaccagctaccacagagttgtgatgacagcagtctcacaatatgcacctgacatagtgcatgacacatcaataattaacaaatagttaccattcattcctctcaaaaagtgttataactcaagggcagcctttaataagtcacatctagaattcagggaggatagagggcttaatgaagttagggggaagcatatggtgtcaagaatgtggacaamggctgaaccttgaaagttcwgtcacataatagttatttgtccacaggtgacatactttactggcctcagtgttctgattattgctgcaaggactgaaaaaggataccaggatctttgcctaaattaggaaacatttatttaccccagtttcccctacaattcctgtcagaaatgcgatatctcatccccagggcaaagtgtagatcattgtaacatttttaatccaacaaagaaaattttccttttattgcatgaatcagttatgatatacattcagagaaatgacttaccacccagmatttccttatctgtaatctcttgtcagaagagcaaaccattggcttcatgctctgtgtgtaactatagggagatgctctttccttcagtattactggtgttcagaaaagtgaaatcatcaagatgtaataccataatttgcttaaagtacaagacagtaattgcttattagtttctgaaattgagttagaggaaaaaggaaacattttaaaacacaaaatcatcattttcaaacattgtttcttcttttacctgttttttttttcatatgtcatttaatgttctaatgtaattttctaatgctgtatgagatggaaattatttaggaaggtggctaataaaactaawcttttcttatgctctgcactattaatttctctcccatagatattaaacattatgagccatctaagatttttgataattatttcttaattattatagaaaatgatttatttatgttattgaggaatttgcttttccaaatttggaattccaaattccaaatttgcttttgtaaattctattgcagccctttaaagtaaaacaaaaacaaaaacacctgaattcatattgatatgctctctgccttcagaaatgacccagtaaatctttagctaagtgcagctggaatttcacttggaatatcttcttaagattacatagytaaaaggcacttgaaaaagagaaaaaaaaggatccattgcttattaaaagtaatgaataatttaaaaactggcagcaagttattactatagagttagagagttagtagtcactgataggatttcataaaactaggggggaaagtagtaaagtatgaaaaataagttcttcagttagtttcaaagccgagagatgctgttaattagaactatttattaggttgttgcaaaagtaattgtggtttttgccattacttttgtgacaacctaatattatttttaaaaccrcaatagaataacttagtgtgtgtgagaattacctttatctaaatgctactctaaaaaacatagatataagaaatgaataattcagaccttagcaacagcaaaacattgaattttgtacaaataataaaataaagagagagaatagggagctcaccgaaaaattgattttcagtgaggtgcaggtaaattagaaacctgatgcaattcttcagcagttctcattattttatctctgaaatattttgctgttaattaaagttctgcacaatttaaattgcactatggtagtcaaagcctggcctcggataaattcccttggtgtagccgtgaaatgacctatatacccagaaaccagttaattattgccctaggatcttcaagctaaatatgaatagacaaaaacagtcctcctatagaggaatggttcacagagtggatggaagtcccaggggtatgatatgggcagggaactgtcatgtgtattgaggtaaggtacaaaaagctgctttcgcttcagacacaagggacattttattcctaggagaacaccctttgtaaatgtggatgttcacagttatgagtggggtatgagcctgcagtgtatgttttgcagctctcggagctctggcggtccacmaggaaatacctgcagcctgacaacctttccaaggcygaggctgtcagaaacttcctggccttcattcagcacctcaggactgcgaagaaagaagagatccttcaaatactaaagatggaaaataaggaagtattgtaagttccccaacctttgtgtggggttgtctgtcagaaacatttctggattgttggttttttgaagtaagaaagaccccttttaaaccaactgccccaccwccaaaacaattattttcttgtactacattttcatcgaaaagttatgccacagtgcagtaatttaatggtcacttgaccagaaatacaatagcagattttcagcagggactaggaataaacatgttgttgtgtttatgagtttaaatcaggactagattggtacatagataagtgaaggcaaggcttcgtcgtgacatcgtggggcatgtgctgcctcgctgtttttgaaattatgttcctcatgctgttaattgacacctgaacagatttgagttcatttaaaagaaaacaacaaaaagggtttgacttcttcagttgaaaatgtgatttcactaaacagccagttgaaactatgttttatgtaaaaaattgagaactgaggcgaatggtgaaaagaatctggagaaaataaatccatatgttacttaatatttggtgaaactatgatccattttacatgtgtaataaacagagttgacttaatttttccccaaaacattgcatctgtttctaaatagaatgtatttttagtctatcatacagaatttgtgtatatatacaaattgagcttatgataccaattatcctaattgatgatatagaacaaggcccaattaatttgacaaacagtgaaaaacagtcattaacataatcaaaagtggaaattagccaagttacacacacacacacagcagtagcagtcactgagttcaaagaactgaattccccaacaggaggaaaattgcagcttttttctgaaaagtctgtttatgctcaattgcatttatttacttgccttaaggacattaaaaaattgataggaattccaaatgactaatcaaagttggttattctcttcaaaaataaataaaccagaaattgaaaaagaagcaaaatcataaattatcaggctctgttttaattacagcatgttaaaatatattggtagagggacttgtcttaacattattttttatatttttaagattctttaaaaattttaccactctcaaagtacataggcattgtcttaacattaaaggcagacattactgagaataaaagtggaataattaggtattaatttagaatagagattacattaaaccttattagcattatctgtatcctaaaaatcttaaggcagcaataatttggaggactgcatgatgtattttctaaatcagattatttatacaatattgaaccatataacatgcaacacacatgtagtgtagtgtaatagaaaggatactaagatgaactaaaattggaaaatttagtttaaattctgacctccaacaacagtatatccttcaaggaagtcttttttttttttttttttttttttttttagacagtgtttcgctcttgttgcccaggctggagtgcaatggcgcaatcttggctcaccacaacctccaccttcagggttcaagcaattatcctgcctcagcctcccgaatagctgggattacaggcatgtgccaccacacccggctaattctgtatttttagtagagatggggtttttccatgttggtcaggctggtctcaaactcctgacctcaggtgatccacccgcctcggcctcccaaagtgctgggattacaggcgtgagccaccgcacatggccaaggaagtcttttatatttagcttctctgagcctcactttcaacatctgtaaaatagggataataattctttctatttattgtaggctagtgagaggcagggtggtggaatgtaacatttcccaaaaagcctatatgttgtatcctgtaatttgcaggaagttaacaggtatgcaaaaaggaaaagattctgtgagcaactgagtttgcaaaactggatgaaaccttgttaatttctctgttgcagaacttttcagtatctttaatcagataatattctggtaagttttgaatattttctaaaacacatgatcttgaaaatcccttttcttaaagcattttgtaagactagtgttaacatggaaaacactttgagaaacatcactataattaagaaaccatrgactccagagtcagaaaaacctaggtttcaatcccagcaatgccatttaccatttaccagctatatgaccttgaacaaatgactaggtrtatctgcgtctgtttcctagcatgtacaggggaatattaatattaaactgacagagatgttcagtggattaaatgaggtggtagtattagtaacagctaatatttatcaatcacttactatatgtcaagcactcttctgaatgttttacagagataacataatttaatcctcccaacaatcctgaggtaaatactactttggcttcattttacagatgaagaacttagagattagacacataaaatttttagtacagtgcttgcacaatataaactcaataagtattatgtcttctagttatctaagcttaattcactagttttttgttatgatcaaaatagtacaagtatatcattttttaaaagtataaactactaagcacatgtcacattgtctggtgtgcttatataggggtagtatgtaatatttacatacatgtgttaattagtatgacaactatttttagaagttttaccatcccgggctcaaaaagccaaagatttttgatgactagaatatataactagagttttcctgtaggggttccattctgttcacacatattcattgtggttaaacatagaactatactatggtgtgtttttatttttaaaaagaggaaaacctttccccttggatttaaggttaaaggattttccatcaaataatactgctttagttcaattaggcacttctgaaataggtttgtttgcaaagctaattaaagaaagagaataaatttggggacccatagcttttatgtattactcatataggaaagaatttgaacttaatttataattgtatttatataatttttacttacaaatcgccaaattatacttggcttaggttaatatagtaaaattagtttgtatattctgagtatacattgtttgagtgagagagaggggcgttcaaggagaaaattaaaataaaatggggaggggtctttttgagaaagtcttaatcattttttcatttgttcaaattaaaaaaaaaatcacttcttgagaaaactcaaaycaatagaaactctgtgaatggtagagatttttaagtattccttcccctaaacattgatatccatgattatgcctttttttatagacctcagctggtggatgctgtcacctctgctcagacctcagactcattagaagccattttggactttttggatttcaaaagtgmcagcagcattatcctccaggagaggtttctctatgcctgtggatttgcttctcatcccaatgaagaactcctgagagccctcattgtaagtcaaatagaaaataaagaccctcaactcctataaaacttcttaagaatattaacagtaattaaaagtttcttagatctgaatgaaggctatcaactagagacttctgagtattcatattcaaattggggtattttctatccactaattattaactgtataataaattatttcagttagtgcctttttcgtaatttcagtaagtagtataaactatatggaaatttaaagattgtgttcacctatcatgttatatagcataggacagaatttcagaggggagaaatctagcttatgcttcagtaatcaattttacaagatttgttttgacttcaaaaattctcatgatatttaatacacctacattgaagagatacaattcttctgctgttaaagatttatgttgaaaacaaaagctagacttctcttgtgtccaagaatgttatctatttaattgcacttgtctacctatgatctagtggaatagttcataatctttatggaaaatgtacccattcagaatctgataaaagtgatgaggcccctttttactcatacataaaattttataaccctcacccctcctttttttttttttttttttgttcattgaccccatgaatccaatccataaatttccagggttaagaattccctgtaccacaggttaaaaatccctgaaaaggggattaactcttyaattcaaagctagatagcaaatgtgtaagtgtctcaaaagcaaaattctgagtttgcaatctagaaacataaaaatactttaccaagtatgtgtttattttttaactaaaagtgttccttggaaatatttaaatgtcttggtaacctattttatccctgtttggttaatagagtaagttcaaaggttctattggtagcagtgacatcagagaaactgttatgatcatcactgggacacttgtcagaaagttgtgtcagaatgaaggctgcaaactcwaagtaagtgcaaatccaatctcatgtattacatcattctacaccattgtccatttgatactcaccatgctgcctactattggcactcctaattctctttactctattctacttaccttatttgcatagcaatttttgccatctaacatatattaaaattcagtcatttattatgtttattgtatatttctatttcactagaatgtaagttccatgaagaaatggatctcagtttttttcaacaccaattgctcaccagttcccggtacatagataatatttaataaagacttgctaaaaagtgaatagtacaataacctccctacccatatactttattgagtgcccactatgtactcagttttaaatggtgtgtatgatatacttcttgttttcagagaaatattagactctaagtctatctcctagagtagaactttgtatatagtaagtgtggtttccagttttaagttttgatagtagaaatttagttacttttaatcacagagaactttatattttattttcaatttcatttgcctaaagcttttccacttgcctgagtggactatcaattttcacgtctttcttattaaaaagcaaaaagcaaaaacactttttaagtataactaaatatggaaaaccaaaatagattaatgtctaacacagtccatctttctataatgcaaataaagatgctaaatatataacaacatagtctttttttctgtccacattatacagccagtgtcccatcagcattttttctacctcagacagcactatatatcattttgcttactaagtgcttgctattaaaaatagtagggaaaatgttcttgaaaccaaatggtcccaaaagaggcaagccaaaactagaatatacattaagtatgaaaaagatcactaaaaacagtagtactgaaaaggcttgggtattaacttattaagttctggcagaaattaaatttattatttttatattagggaagcatgacttcttatatttttcaatttccataattatttkagtagctgatttacttcagctatttgtgtattaaatatcttggcaaaagataaaacccacatatcaaaagatctattcagcagtatttaatgagcatctactctgtactaggcatgatgctagtcctcaaataaaaagataaataaaatattctaccatcctcaaagaactcctagtctgtttatcaaatataaacaaataaataatattgaaatataaacaaagtgctcagacaatacagaagatgcagcaacgttttctgtttgagtgtgctcgagaagtttccaccaaaataacaatttttgcacttaatctagaagaggtttttaagtgaagaggtcaaagtatggaatgaaagacattctaggagacatacaataatgtatgaaaaggcccaaagtcaaaataggcctggtatggttgggaacagtgagaaattctgtggggttggaacataaaatatgtatgtttctgggggcagataagtgacagtggagacacaggaaagatgggaaaagagatggaaggtgagccagatcttcattaataacaagctaaggagtctggccttcattccacagaaagaagagaacagtgaagtctttaggcggatgaatgacatactcagattttttattaagaaagaagcaagatgttttgtggactgattgtttaactggattagagttagtgagatctgactggaagcatttgcaataacctaggcaagaattagtaaaggtctgaattaatgtaggggcagagggctgagaggagatagattcaagggccactttatttagtgactgataagatgtggaaaatgagaaagagataagaatccaggtgactctaaagctttcagttgaggttaccaggtgtatggtgatgccgaccacttaagtaaggtttatacagcctggttgggggtgggaggagagtagagctattagtttgttttggccatgttaagttcaaaatcctttgggtcaccaggctcagttgtccaacaggcaggtgtccacattcacctgcagctcaggagagaagttagggtcagaaatagagagtggctgaaaccttcaaagagactggggttacctaggaaagtcatgtagcataaggaaacagaacaaaggatcaaatttaaagttcttctgataatggacagcctggttctcatcacatctttaaaattaccttgaaggtagctgcaaaccatctactatcactggcattcaattttgttaatatttttgagcaaacattttttttcatctttgaggataataagatttggccatagtgaatttactacagaagaactgtagtaaaggttcagtttttcttttgaattttctgctgtgaaacactcatctacgttttgtccaaatcaaagatatatgaaagaaaggaaagaaaattatgtattgtattaaataagcacaaatttaaggtagctactgggcacactatatgcatgctgtgtaaaaggaacctgccattctgtgtagttctatagcctttcagaacttactaggataaaagctacagtcctgtgacagtctgaatggcagctagacaagtgcacaaccagtactatgccacatgtttctkttttatgtttgtcttttgcttatgttttgacctcccggcatcctaattccttattttcactgaatttgtacttgaaaaaatgtaaacctacagaaaagttgtaagaatagtacaattccatgaacacccagatatctttcatctagattcatcagttgttaacgtattttcatctttgctttatctctttctgtcttattttagttgaataatttgataataaattgcagacatctgacattttacctctaaatacttttacttcttattacttgagtgccattgcaactagtctcttacaatgaaaaaaatacatgtatttaccaaattgtgagttcccactgctatctctaattctaattctaattcaacactacagggttattttttccctcatttcatcattctattttccttcycccactgtgacaactgtggttttcgagaacaccaatatattgattcacctgctcaattctaaaacatacacaatatatttttggaattgccatactgatattactacagaaacaaactaaataaagttcaagacttttacagttctttttgtccttagaatatattccatcgcatgtacacaaagttctatgctcaaaagttacttggattaattctttttcattctcttctgtttagtcatattatcaagttgatagacatttagtttcatttgtttctggttaaactgaattttgataattttccatcctgttgatttaattttatttcttgaacatgtgaaatagtaatgtggttcaaaaggcagaactgtgttttaaaagtattaacagagaggtctcatcgcttctcgatgcttttcccccaatctcacctacttcctctaggtaaaaaaaatcactcattaaaaaaaatttttctttctatgtttctttttgcaacagtaaacagatgttcacacatttacatacttttttgcacaaaatatatcattctatacatactctttttgtatcttacatttttcacttaacaatatatcatgaaaatattccctacatagagatctttttcattccttttgacaactgcctagtactccattgtgtctatggactatgttttatttaatatctcctatgaatggtcatgtaagtggcttccactattttgctgttataaataatactgaagtgaataatctcaggcacagatttttgctattgttgagatgtagcttcagggatagagttgctggtcaaaaagcagttctgtttgtttttctcacattatcttccataggaattgtaccattttaggctttcatcagcaatttatgaaaaggcctatttccccatagtctcacctacaaaatatgttagcaaacttttgaatttttcaccaatttgatagttgagaaatgtcacttctctgattaagtgtgatgtttagcatctttccttctattgggagccttttgttaatacttctccactcttccccatatcatccattctccccaaccccatgtatgtgtgtgtgtgtgtgtgtgtgtrtgtgtgtgtstgtgtgtktrtktgtgcytgtagcctaatttcagaggttatgaatcctgtggatgaattagatcttaaaaccctttatttttaaaaaatttttcagcctagactctgtcatacaaagaatctttattttaaacatgaaactgaagcctctaaaacatatgtagtggcaaatataagaccagaacccagatgtccctatttctaatttgctttcccattaaactattaacttacactcaatccccctttttctcagactaggacaaaaggacttttctgattgtagaacatatttgaaaagtacctagtaaagtacctaccacataggaggtactgaggaaatattttttgaactatattgcagcattaattaaatttggaattaagtgaaaacaaacacttttaaaacatttagagccagactttatggttgaactctaagaggtctcacccaagttcttacttaaggaaaggtgtatggtgacactaagactccatctaattgttgctttagcaattcagtgaatgagcagttttttgaataaccaatcacaatgaaattaaaaagtggccttatatattcaaaatgtgttcaaaacaaaatatgcccattattgataatactcattgcttcttaagaatgtatatgtattttttttaaaaaaagcataacacctttatcaagctttacttgtttgcttttattccactgtgtgcctcagtcaagcaaccaatgcaaaactttgtaaaactgtaggttgctttcttggacccaagaataaagccagtctcacccaagtcttcttcaatgtatggtcatgcatatatctaaggtatatgatttttcaggcagtagtggaagctaagaagttaatcctgggaggacttgaaaaagcagagaaaaaagaggacaccaggatgtatctgctggctttgaagaatgccctgcttccagaaggcatcccaagtcttctgaagtatgcagaagcaggagaagggcccatcagccacctggctaccactgctctccagagatatgatctccctttcataactgatgaggtaaaatctccaagaatatttgcaacatttacagaagaaaaaaaaaaagcatgctgaacatgagtcaaatgcaaattccgctcaagtcactctgtattttccccaaatagtcttctctcctgcttaaaaataactcttaaattgcatttgcggctattctaaatatcctcacagggtaacgtcctatatctatatcctgaagcataaatattgaagcatattctcttattttaagaaacaaattcttttttgaaatatatttacttttataagttttaagatgctgttacatttttcaatactgaaatatcctggtttaagtataactttgtttgttactacaactacatttttcaggaagccatctaaattaaacctttgttagggcagagaatgtctataaatctcaagataaaccatctgccgagaatggtgtttccagtttatagctaagcaccttcccaccagttttgtgttgaagttggtggctgcaaatcatgatggttaggggcacaggcttttgagaaagacagacctacgtataaactctggctctgtccttccctggttgtttgttcttgggtgacttgtttaacatctacatatctgagagcaaagccaagatttgagggagttagtaaaaggtaaagggaaatgaaattaaagaaatatttataaatgcttagtatagatccttacacattgaatatcattaggcagttctaataatcaatgaagttacttgttgctatggaatgcaattattttggcacgttttcttcgatgctaatgttttgtttagaaaacaaaaggatcctaatgtaacctacagactttgggtaataatgaagtgccaggtagatttattgaatgtaagagatgtaccactgagggcattgttgatacaaggggtgattgtgcgtgtgtagggttaaaaggtgtgtgggaactctctgtactttccactyaattttgctgtgaacctaaactgctctttaaaaagtctattaattaaaaaaaagagagatgggaagattctgaggtacttcattgtaaggaaacattacttcatataactacctttccccagagccccatgccatgtagtatccttaaaattctatattagttaggtaacaccaggttatgctgcaataamaaatgtccctcaaaatctcagcaatgtgttaaaagtttatttctgagccaggcatggtggctcacgcctgtaatcccaacactttggaaggccgaggcgggtggatcacgaggtcaggaattcgagaccagactggccaacatagtgaaaccccatctctactaaaaatacaaaaatcagctgggcatggtggcacacgcctctagtcacagctacttgggaggctgaggcaggagaatcacttgaacctgggaagcggaggttgcagtgagccgagatcgtgccactgcactccagcctgggcaacaaagcgagactctgcctcaaaaaaaaaatgtttatttctcaggctatgcctaatgtgcataaggaagtatgtggtctgaagttcactacagtcatggaagaaagagatggagaaagccaccagctcttaayggcctcagcctagaagtgatcctcatagattctatccatggcgtattagccagaactagtcacgtggcccccaccaaatcacaaaggaatctgggaaatgtagtaacacatgtatatttttatgaacactcactattcctgctattcctgctgaaatgtccattttaaaaatctagatgtgcactaagtttgaacatcttatgaacaggtgaagaagaccttaaacagaatataccaccaaaaccgtaaagttcatgaaaagactgtgcrcactgctgcagctgctatcattttaaataacaatccatcctacatggacgtcaagaacatcctgctgtctattggggagcttccccaagaaatgaataaatacatgctcgccattgttcaagacatcctacgttttgaaatgcctgcaakgtataatayattgcacatgtctctctgtgtattcaagcttatttgtgtgttcatggggtaccgatgtagctaataataatgatgtggtcattatgcagggttacgttgcataaaaccaaagagtgccagatttcccataatagggctatttagggggccagatgaaacaacttcactttggcactatgagtccatgactggtaactctgggtataatttttagtagggatgtcttgttcagtctggcaagtgtatattgccaaatgttttaaaagctaactgcattttcaacaggattttaaaaataagtacaacaaaacaaagtaaattcttaccaaatggttttcattgtaacatttcaagtgttaggaatttttgaagcctcatttatcacagatcaaataaatttcccatttaagtttaaaatcttaggcacggcccacatttcaaggtgattcaaaatttaaagagtgcaatcagtagagttcatcactctataactcttgctgaattaatttccttccagttaccaagtctgtcctcccaaatgcaaagtggctcccccaaggtgcctcctccctggaattagagggtcagagaaggaagtttcatttttcctgagttacatgcagaacactacccccacgaaagatcagatttaagcattcaccacagagattggaagggtggaaaataaagggaaagaaaatgaaaaaagacagcattaaaaggttgaaagaaagagaaacaaggactaagactgaaggaagacataagaaacgggtgtgagtagaacagagataagagcaggacattcaggaaagagcaatggagcaagtgagtgagaaaagaagccaaatctctctgcagccatgtatttctagttgaacgcatttagcttctccatttctttgtttgcttttatgagrccctgtgaaggagatcctgggtgtacttgctgccttcgtcttatggctctagcatttcagggacccggaaagaggagacagtggggtagagaacagactagaaattgtgaggaaaatatcaccaacattatggttcagagtctcagaaccaaaaacattagagtggggaggaacactaaaggctcccttgcttggtatctctccactgtagggctgtagtctcccagcaggtggtattcagactttgcttccctctcccgatgacaggaagctcaccatctttgagggaacttgtgccagtgttgttcagagactctcaccattatgtctttgtataatctgaaatcttcctattggctctggttttatcccaggagcaaagcaaaacacgtctagtcattcatccacaagaagaccctttgaatatctgaggatagctgtcataacccttctcatctttgcttctctaggctaaaatcttataacctagtgatattggaggggaaacctctcaggatgccattgcctcccctcaattattttctaccttagacctaggaccagatttctataattgattattttgatgttttgctatgttgtcataatgttgctattactgatatgattaatgttatgtaatcagaaatgaacatcttaacactaattacttagacaagatggacgcaatggggtaaggattaagacttactccagaggagacgatgatttctatatgggttttactgagctgtttctgtaattggaaacttcacagatatagaagaaatactggaaatgtactgttatatgtcattagtgagagagactattagggaatgcagaaaaacatttaaagaaatattgtgcaatctccccagtttggcacaattttcctttaagtgtatgcactattaaacaataaaaccatgamgaatcaaagaattttgccatgcctgaaatgtgtctactagtcaacttaagccacctcaaagctggacacccttgccttgctgtcattttgataccaaactaaatttcaaatatctgagtaatgaaggggctagccctaatcctgatgctaccacgccagctggcaccaccctggctcttggaaaggcatgaggaaaatttggcttcctcttttttccactgaggattttttttttccaaatttgacttgggaaacwgtcattacaatgaatgtgcagctttttttttcctcatatgttgcagcaaaattgtccgtcgagttctgaaggaaatggtcgctcacaattatgaccgtttctccaggagtggatcttcttctgcctacactggctacatagaacgtatgtacaccaaaaagaggttctccttccataccycacaacttagcattgctggaactgctattaaattacagttattgtgtgtcatcaggtagtccccgttcggcatctacttacagcctagacattctctactcgggttctggcattctaaggagaagtaacctgaacatctttcagtacattgggaaggctggtcttcacggtagccaggtaactcacttctcatggattttgctyaataaagtatgcaagaaatcaggctgaggtaaaataaaacatatatgctgtgggtaatgctatagaatgtataagttaatggtggcttctgtcatattttgcccatgatttccttatctgtaagaggctgtatggtttatagtcactcagagaaagtttcgaatwtgaacttgaaacctaagtaatttgatccattgaacttgacaaatgtccatttgtcttttcaaaggtgcacatattcacaaaactgaaattgtgccaatatttcttacataaacgtttaaaaataatattttatttttattcacagatatatttcttagcctcctctcacccccaagtatttaattmtagaatatattttccttttctggttgtttctatgaagagattgattccccataataaaacccttcataatagaatatgatgctctaaagagtcaatctgtatttctccaacactgctagaagagaaaagaataaaatgtaggcattcaacagctggctgacttccatccctttagtgttatccaaattgaggtgatggtctataaagacttcctaataatgacatgtactttctttttagtttttatgtacatgaaattattaccttgtaaatacagccatttaagtttttaaaatgatccaatgctataaaaacttgagtctttatcaatcttatattactataccttttggtagtactgtagtcagagtactatgcctttctgtcctgaggaatcacaatctgttttctgatatgtactttgaaatgcaaaacatccaggggttaaagggctgggtatggaggacagaaaatatgtaggattcctatttgttgtggaaataagtgtgttagccccctcatggtgtttatcgacttttttttttttttttggctagggagaaaagtttgacatggaatggggtgagtcatggcttagagaataccatgtcctcacatagcagcagccttagaatgactctgccaacacctttccatctacttttagatgctctgcaagacagctgatgcgttgtatatgacagtcctggaaagactaagagtctgtaggatgccatcataaaatagaaagctcatggttttcatagtcagacagaaggggtatgggtcccgcctctgacatttattagctgagtaaacttgaaaactttttttgcctcatctacaaaatgggtaatatcatatgtacttcaaagagtggttgtgaggattcaatgaaaaactaacccaccttatattcaggcacagaggtttttgtctgttttagtttttgtttttagctgttgcaaatatttaagtttttggccccttgagaagttctagctgcagctcagaagcttcaccattatttacagagcaggcagggagcttgcrtcatgaacattatattgattttatccaggtggttattgaagcccaaggactggaagccttaatcgcagccacccctgacgagggggaggagaaccttgactcctatgctggtatgtcagccatcctctttgatgttcagctcagacctgtcacctttttcaacggatacagtgatttgatgtccaaaatgctgtcagcatctggcgaccctatcagtgtggtgaaaggacttattctgctaatagatcattctcaggtaattcattcagtctgtgagtatttattgagtccctaaaatacgccaggcacgttttaaatatgcttagttcttggaggatacaagacaaaattgtgcccatcttggagctcatattccaagcacttggccctcttggtattggtcccctttctcctttactatagatatgttataatttcatwtattagatgattaataagtgcctttaattggaggcaaagagaaaatgttgatgttaacagaaacaagaaagkttaggacacaacagaatagagctaccactgtctcctcacttggctctctcaggcacgagggcttaggtgatatttatcctgaaggcaggagctgaactatgtggccttataagtcactgatgacatttgtaatgacagagatgatgaagatgcatacagtgcatcattttgaccctgccaaattagtagaggcacaagcaaccacggccatgagccacatgcaagaaatcatgaagactctttgcccaaaattctcatgtatataaaatctcagaaagatgtgttcattcttagagtataggagtactttcattctctagagccacattcttcaaaatggttttcaattttttgtggcccgaaatcttatgatactgtaccaaaaaatgacaatactatctttgatgcagtaagatttaagtggccaagatactgtgggatggagatggtctgcctaattagattttctgaaaaacagaagagggttaatctgaataacctttgagtctgaatgtttggtgcttaaaatttttctttaatagtttgatttattttctgcttcactaagcatagcaacataaaaaatgatatatttgctaaataaaatcttatgaggaatcaaagtgatcactgtgtactctaattcatacttattatattgagaatatataaggagattgaaataaaaatttacagatgattggattgacttgtaaagtttactttattgttttaatacattaatggataatagcctacgtktgaattttgcctccgttaccttcttgctatgtgctcttgggcagttacttaatagccttaagccacaatttcatactagtaaaatgaggcacctggaacaggtggtctgaagattttatcagcttttttgtttgccagataatttgaggattctgatttgttaggttctggttatgaaatcatagattttaagggctgggagatatcttaggtattagactgtattaaaactcctccaaaagctcattatttgggattaaacagtgttaattttctatctttcttgttcctcatatcagctcaggatagctgtatataacaaaaacaaaaagcaatttagagtggcttaactaaatagtttcacttttatagtgtaacaaacatttggaagtasgtggtccagggttaatatggaaatcttaagatatcatcagaatccaagctgccttccttcagctcagccattcttacttgtgacttttgacctcatgcttgtcaccttgtgattatcagatggctgctccacttccagcaccacttcctcattccaagatggaagaagggaaggataagaggtcacagagtctgactctttttcaagaattgtttggaatccctgtctaggttttggaccaaaacggtgttacatggctatctctagctgagagagaagcttttgaacatagtttttcaatgggtgtctgaacaaaattgtttctgtcaatacaaatgtagaaaggacaaagagcagtgcgtcttgtatcccttaatcctcaagtcacacatkaaaaaaacagttctcaaattatatcagaattttacattgcacaattccagttttaatgaaagaatcgtctaaaggcagcataagtactgaaaaagtagtccacgttttaggacacagaggacagctcaacaccacctgtatgtgcttagctacccataaacaatgcctgaggatttgaatcggggtgtaaaaccatgaggagtaatctagatctgggtcagcaaacttgttctgtaaagggtagaaagtaaatattttaygctttgcaggccacatggtttctgttgcagccactcaattctgttactgtagagtgaagacagccatcagcaatacattaacaaatgagtatggctgtgttccaataaaattttatgtacaagaatagccagtgggccagacttgcctgctggccatagtttgccaatccctgatctagattawcttgtacagtttttctattcactaagctagggcagctaaggcaaggcatattctatgagaaagattgccccctagctattaaacatagcccagtgtctgtgtgtcaggttggagtatttggcagatctgaggttattatacaaattaagctgtctgaggccccctggctctgcagagcactccagtaatgccatcctagcttcagagacacataccactctaggtcaagtgctgacactgaaggaaatgttggcagtgggtagcccatcacagccaccagggcagatggaattactctgtgcttgctcacactttctctcttcagctaattggattactcttcagagaaagatgtctcataaagtcagtttaataaggggatcctctttagccagtaaagaacatatttccctaaatggaagcaacaggatgagttgtcaaaatgtcagcatctgagctataagaaacacttatgggaccaagaggatcaaagaggtcacattagctacaaagttctaatawctttttcctctagttcataggaaagaatctaaataaatatgcactctgggccaaacaaggacataaacctatgctctctctctctttttttttccttttttgcaatatttcttagaacaggctttcttgtacaccaggagacaaaagagaggtatgagtttgtgatagccatgaatattagtagaaaagtcttcacccaggccaggtgcagtggctcacgcctgtaatcccagcactttgggtggccaaggcaggtggatcccttgagctcagaagtttgagaccaggctgggcaacatggtgaaaccccagatctacaaaaaataaaaaaattagctgggcatagtggggtatgcctgtagtcccagctactcaggaggctgaggtgggggtgagaggattgcttgagcccagcaggttgaggctggtgtgacccatgatcacaccactgcactccagcccgggtgacagagcaagaccccatctcaaagaaagaaagaaaagaaatgtcttcaccctagagacaattggagtgtttattctggcttcatgtgtagcctctgagcctgatttttcctttcaatcttaagatataatgcctaccatggaatattggtatgaggattaaatgagacaccaaagctttgtagagctttgggcacacagtatgtgctcaaaacctgttagttctacttactttatactgcttaaaaattagcaccatgtggcttagtccctttcaaaaaggaaagagtgctttgtttttctacaggagtcagtggtttatctttataagggggtccaagaaaattcctctttgcacatgcattcttcttttgtccctttgtgtaaggaagtagaattttcccagaaatccaaggcactcctcataacccaccttgcaatggaaatgctctctccccacaaaaggtgcgttgtctaacagccatgaaatggccttttccatggcacttggtgtattttgccttccatttaatatatggttggtgggaaggccaagatccacatcacaggcctctgctggactgggtggatgaacaagattataattttcaaattaggaagagagaaaaagatgcaaagaaaggaatayttctgaggtgaggcacaccatagctttcatttggaaayaatcatgtttggagtacacatacagaactctcatattttggtcccatagttcacaggcataggtgaaaatgtgggcatgactattgtgttttcttcaggatagtttgtgtccatcacattagttataatgcctcaaacaaccccttcatcccatgcagccatattttgtcctatatcaaatgtctctttaagtatccttagrgctatctcctaatgtgtcctgarcatggcactgagaatctcatgcttccatcaaagagtgtccttcagactgaaagtagcttcatgccgcaaccgtacttttttaatacacctggttgtaaaccaagtcctttgcctggggtttcctgtgacctttttttggaaagtgaagagaactcagggagatcaacacaatccttgctagaaagttaaatcatggcagttatagctggcaaatgcatggcttgtttggtctgagtagggcagttacataaagaagttagtcatcctgccggttgccaggaatttaagatctttggaggaatatcaaaattaaggatactgagtctctttctcaaaatcattatcacttccaacactgtccccaggcaatctgattccaatccaactaaaaagttttgtgccaacatcacctcaactaatgtacatgaaaaaaaaatgcaagacttaaaggctaaatgcaggcaaacagcacaaaacaatgggtttcagacaaccacaaaatttgctcaggatgggccatgtttgtaaataattactgtccctatgaaaaatactattgagttcatgttgaacttgactattaactcagtgtcatttcaaatgtcaaacagcagggtattaggcttagttaaabttgccttcgttttctagttggatgtaggcaattcctggaacttgtatacagttggygtctctgtaaccgctggttcctcatcaaattcaaccaacctcagatcaaaaatatttggaaaaaaaacaccaaacaataaaatatagcaaaacgacagtatatattcatacaatttttaaaatacagcataacagcaacatagcatttacactgtattagrtattataagtaatctagagatgatttaaagtgtatgggaggatgggtgtaggttacatgcaaatactatgcctttttatataagggacttgagcacccttggattttgttatactcagggctgggcataggtagtcctataacaagttccccttggatactaacggacaaacacactccactgggagttttaaatcttgtctgttattttctagcaggatgcagttgactgtatttgccacagcacataactagagaagtgctgaaggacctcgagagatcacctgatccaaacctcctccccttacttccctggacaaaaagccacagctagatttctgatggagatgccttcattttccttagttcaaaagtttccaaatttaggtggatcagaatcatacaagggcttgttaaaacatagattgctagaccccatcctcagagtttctaatttagtaggtatgaaggggaacttataatctgtacttcaaaccagttcccaggcaatgctgatgctgttgttcacagaaacacactttgagaaccattgttcctttcaaagtgtagcaatgattgaaggaaaacatccttcttaaytggcacttcatcactctggtattttaattgactaattaatttagcaaatcaacagagtctacttccggtgcttaaaattaggacagcatgtttccaagcctagagaaagactccaacatcaacacaactcaaatggaattatctacagcaggaggtcaaatgtgccattggaaagggggttaactaaattgtacttattatttttataactattattatgcttttttcttctaggaacttcagttacaatctggactaaaagccaatatagaggtccagggtggtctagctattgatatttcaggtgcaatggagtttagcttgtggtatcgtgagtctaaaacccgagtgaaawataggtaagtgtttatgcattatacatttatgaattacatataagactatatacagagaacttccgaaatatgttttgggaattaatcttctgacttttcaaaatctatgctttctatttggaattataaaacgatagagttggaagtgatcataggaaattattctgtctatagcttcttatgagcaggtcagtacctaatatgactcagccaagaattttcctgcttttaaagacatacatagacaggatgccctgtgaatcagatggttcatcttcttttggtattccaccaagagaagaaatttcactttaaggtaaactttcctcttttgttgtcttcagtggggaaaaataaaatagataatttcatctgtgcagaaactaactattaaatgttaagagtccttaagtcttttcatcagcattcctttttctaaataaaatactctaagctcctttaatttttctaatctacctgtgagatttaatgaaagtgttttactttgaatataaaacaatgtctttgaactagtgtgaagatgaaaattattagccttctgttacagaatttttaaaaaggaaatagaaatgcaactaattttaattttttgatatttaaaaacacattcaggcaaaagtgagatatgtgataaaatcaaatttttgattcatcttgagctatggatgaaggaactgagagcaatcaaacagtagcacatttaatgtgaagtgtgacccacagtgttaccaaaaggaamcacagaatgaaaaatgacactggtcatcaaaaggttcacaatataacttagggcttcccacataatcagtcatctttcacctctttccaaagtactttctagacagaagtttttccaaatgaaatggaattgaattctttgcaaagagaaatcaacaacagcaacaacaacaaaaagtaatttggattttttwaaaaagtacacagtatccttaagaatctacccttatccatattgtaaccaatctgtcttccatttccacttgttcatttgaaaaaaatatcttttaaacctttgctgaatataggacatcagaaggtactctaagtgattcagggattaaaacgacctctgacctatttttacactgatcataacagcagcaggggttttaatttrcrcagcaaaaattaatattcctgtcaaaacataagggcataaaactctcatttaattgtgaaagcagtttctcacagtttgatttaaagtccacaattcaattacagtagaagtaagtcttctgttgaaattatttatcctcttcatcattatccagggcacattccccagccaatgcaatctgtttatccagttatctagagcatcattaaaggacccaccatwtttttcctcctaggacctactgtacatgccccactgtaagaatgattttttgtaacacaatattttttcaaatatcttggcaatcaagggcttacgcctctagagactctttggagaaggtaatgaaatggaattaaaatagctgcctagaagccaacagagagatagttaacaaaaaactataagcatcgattgtcttcttggtgagtttagactccattttaatataacttgggtatttctgacctgctgagaggactgggttccaagaatgttttcattttggtctttgttatgcccatacaaaacaatgtagtatcttacagacactccccacatctgcaactgaaggcaggggagagctcaggggaagggcaaaccttccctgcccaatatctgagactcaccaggccctggttaccagcagaactctaagcacatccaggtcacctctgaatcccttaagtgtttccttccagtcactggcatcatacgttcagaccctgtaaagttacagctgttagtccaatwccattaaatataatatgaacaagttttttctttttttctcaaatgtttagggtgactgtggtaataaccactgacatcacagtggactcctcttttgtgaaagctggcctggaaaccagtacagaaacagaagcaggcttggagtttatctccacagtgcagttttctcagtacccattcttagtttgcatgcagatggacaaggatgaagctccattcaggtaagatgcagcgttcaggtcatgttccaggaccatccccagtgcaccaggaacttgcattcagtttagaacattcagtttcagaattaaaacraaacagtagaaacccagggaaagatgaattttctttaaatgagtagaagaataattgataaggccaaaaaaagtcagtttctgggataccaaaaaraaatctaatgactagttcatttgattctggagatagttatcatattctaatccagaaacaatttatccaggaaagaaaggcctatgatttaccataggagttgccacatagtttcataaaaaaaatcagatacacatttactgtctggtatcttcacaataaactgctggacaaaagatttcaaataaaacacctggcaatccatttaccatgtttaagggccaaaatgaattcgcaatttttaagtattccatatagcagcaacttgaccctgtttaagttttggctcaagtttcagagtttgggattctgaatttttttaaataatgcttttggtaaaatagttagtgttttaaaatacaaagatataatttccatgtaacatttgtgctgtgtcatttgaattttgtaaccattatttgtaacaatactatcacatagagctagaatgccttgagtctaggtagcactgaccctttcataatagttgacctacggtaagcataagggtcatttgtacagttaaaacagcaagccacatcttacatcatctccttttttaagtaggccaaaattgagcaccttcattattttactgacatttcatgattcatattaaaaaacgcattgattatataaaagtaaacgagtcagttgtattttcagagaataaaagattgtgctttatagttaaactattaagctgtcactaacttacattaagtkatatctagaatgaacctccacaaatgcattttaaaaaccccaaccttctaatggttgaaatgcagtgaccaccaacccacccacatgattaattggtttggttccacatttgccttgggcsagagctcttagaatgtttctctgtccgcattctctgcttaaatccagctgggcttgcctgttactcaaaaggagagtgctcccaaggtggggcttctggaatgaagggtgagacacagcacagcctgcaaagcttaatggcatcaccaaaaagctgaaatgaatttagtctttcattctagaaaaatgtatggcaggactcccatatcccaggcatttgaagtgtttctgttgatataaaaagaaatgagaagaaaatcacccattcatggagtagcctttgacactcatatcctttctcagattgctttggaacagaarcttcaagtacattcagtaacttggctggagaggtatagggtgacttaactgtgtgtgtaattctgttattgttgctgttgttgtacaggcaatttgagwaaaagtacgaaaggctgtccacaggcagaggttatgtctctcagaaaagaaaagaaagcgtattagcakgatgtgaattcccgctccatcaagagaactcagagatgtgcaaagtggtgtttgcccctcagccggatagtacttccagcggatggttttgaaactgacctgtgatattttacttgaatttgtctccccgaaagggacacaatgtggcatgactaagtacttgctctctgagagcacagcgtttacatatttacctgtatttaagatttttgtaaaaagctacaaaaaactgcagtttgatcaaatttgggtatatgcagtatgctacccacagcgtcattttgaatcatcatgtgacgctttcaacaacgttcttagtttacttatacctctctcaaatctcatttggtacagtcagaatagttattctctaagaggaaactagtgtttgttaaaaacaaaaataaaaacaaaaccacacaaggagaacccaattttgtttcaacaatttttgatcaatgtatatgaagctcttgataggacttccttaagcatgacgggaaaaccaaacacgttccctaatcaggaaaaaaaaaaaaaaaaaaagtaagacacaaacaaaccattttttttctctttttttggagttgggggcccagggagaagggacaagrcttttaaaagacttgttagccaacttcaagaattaatatttatgtctctgttattgttagttttaagccttaaggtagaaggcacatagaaataacatctcatctttctgctgaccattttagtgaggttgttccaaagacattcaggtctctacctccagccctgcaaaaatattggacctagcacagaggaatcaggaaaattaatttcagaaactccatttgatttttcttttgctgtgtctttttgagactgtaatatggtacactgtcctctaagggacatcctcattttatctcacctttttgggggtgagagctctagttcatttaactgtamtctgcacaatagctaggatgactaagagaacattgcttcaagaaactggtggatttggatttccaaaatatgaaataaggaaaaaaatgtttttatttgtatgaattaaaagatccatgttgaacatttgcaaatatttattaataaacagatgtggtgataaacccaaaacaaatgacaggtscttattttccactaaacacagacacatgaaatgaaagtttagctagcccactatttgttgtaaattgaaaacgaagtgtgataaaataaatatgtagaaatcatattgaattccttttgtcttttgttacttccaacaccatatttctcattcctgccactttctgagcctagacacatacacagttaagcctctgcagcaatacaggtcaggccaggttctctagatgggagaccagacccatttgaaaaatgggccactgaaaatatcagcagtcagaacctcttaaggacgtgtgagcttgaaaacatgccataaccccagttttcataaagctctggactggcccctttactgtcatgttactaaaaaggaagaaaggaatcagaaactaaggtggtgggtggagcatggtatgtggtagcatcagccttggggaaaccactctgtaaagatgctgacgtcgcagggaaagtgagttggtctagggtactaagctgaagatgttgtggactcaggcgcttcagccctgtgaggtttaacaaatcacagccacctctgcaaaatgtaatcatttacttaacaatgatgactgtggtgctctgaatgttagtgttttgccatttcccaactgtttactgggctgctgagccaagtatctgcccacccagtggagaatggatgatcctgagcaactctaacatgctccaaagaaacaagaaagcagcagcataggacaaacagtaactcctttgtagataaacaagayagaaaatgaagaggggtagagtgatagtccacatttggaaataagatattggagccagaaaaataactttaaacctcatttgcagtcctctagttctgactacttctccattataaatgccagcatacagacacatttgtcttctgaaaagacatctatttgggaattgtatagccccctaatgtgaatctccaggcctctgtccagtcagatctttcctgcaagctttaagattagcgtggcttcttttcttctgtgaagtgttattgtcattccctggctcatgttgcagtcctgcctgtgacaagttgctccctgcttctctaaactgaccaccttcaagtaagtgttaaagctaacacttactgagtgcctattatatgcgaggtattttaaagccttttccgtacattaatttaatcttcataaaaactatatttaataggtagcattatttccatatgatagatcagcactaagagaaatataatatgagtcacataagcaatttggaatttctagtagccacattaaaaatgtaaaccaaaacaggcgaagtaaactgtaataatatattttatttaacccaaaatatccaaagtattatcgtatcaatatataagtaacataaaaattattaatgggaagctttacttttgtggggaagattaggtcttcaaaatgtggtatatatcttgtatataaagcacatttcagtttggatgagacacatttcaagtgttcagtagatgcatgtggctagaagctgctgtattgaatagtacaatattgggcacacaagacatttaatttgccccacagaagacactttctcacttagaaagtgaaagaaccaggactcaaatatgagtagtttcacctcagaacctgctctctgaacccattataggatgtttcccacatgcttttggttttaaagatttgctgccaaacgaatacagacagtaggttatgaaaatgagaaacatgtgacagcagcaataaagctaagagttgttgccctttctttttttttgagacagagtcttgctcggtcgcccaggctgcagtgcagcggcgcaatctcagctcactgcaacctcttcctcccaggttcatgccattctcccgcctcagcctcccgagtagcagggactgcaggcgcccgccatcatgcctggctaattttttgtgtttttagtagagacagggtctcaccgtgttagccaggatggtcttgatctcctgacctcgtgatctgcctgccttggcctcccaaagtgctgggattactggtgtaagccactgcgcccggcggacttgttgccctttctctgtggtcgttcagtctcctcctctgatggaatcagaagcccaccataatcaattgtagaacgcatccatcattccaaaaagaaacctgtacactttagctatcacttccaatgtacccatctcccagccctaggaaatcactagcctactttctgtgcctagattcattgtggacaattcatataaatgcactcatatatactatgtagtcttttgtgactggcttctttcacttagcattgtgttttcaagtttcgtacacgttgtagcatgtatgagcactttattcttttttatggtcaaataatattgcactatacagttatgccatgtgtttatccattcattagttaatggacatttggtttgtttccaccttctggatattatgaataattccgctatgaacatttgtgtacaaactttttggtgggcatgtgtttacatttctttatacttagcagtacaattggtgactcaaatggtaacactatatttaactttttgagaactgccagaattttctccaatgtaactgaaccattttacattcccaccagcagtgtataagggttctgatatttccacattctcaccaacacttattaatatacttctttttgattatagtcatcctagtgggtgtgaagttagcactatatttcgaataaataaaaaaatgtatttggctgggtatggcggcccacacctgtaatcccagcactttgggaggccaaggtgggatgattgcttgaggccaggagtttgagaccagcctgagtaacataggaagaccctcatctctacaaaaaataaataaataaaaaaattagctgggcttggtggcacatgcctgtagtcccacctactctgaggctgaggtcggggaatcgctcaagcccaggatgttgaggctgcagtgagtcgtgatggtgctaatgcactctagcctgaatgacagagcgagaccctgtctcaaaaaagaaaaaaaaagattcaagtccttgccctttttaaagttgaatatttttccttttatttttgaattgcaagaattagttatatattttcagtgtaagtcccttatcacatacataatttgcaaaaatcttctctcattctgttggtgtcttcactttcttgataacggcctttgaagtacaagagtttgtaattttgctgagatacaatttatctctactttttcttttttgtttgtttgttcttttggtgtcatatctaagaaaccattgccaaatccaaagtcacaaagatttaacactatgttttcttttaagaacttcatattttagctgttaaattagtccatcatggttaattttttatatagtgagaagtagaggatcaaaatttattcctttgtgtatggatttccagttgtcccatcattgactgttgaagaaacaactctgtccccattgaattattttggcatccacaaacatgaaggctcatttctggactgttagttttattccattaatctctatgttgatctttatgctagtaccgcactgccttgattactgttgctttgtagtaagttttgtacttgtgaagtgtgaatcgcatattttgttctttttaaagattgttttggcaattctgagtcccttaagttttcatatgaattttaggattagcctgtcaatttccacaaagccagcttggattcaaatggagattgtgttgaacctgtgcatcaaaaattaattatattgtctccaggtccatgaacacgaaacatctttccatttatacacatcttgaatttctttcaacagtgttttgtaattttcagagtataagctttgcacttttttcgttaaatttatttcaaatgttttattctttttgatgctattctgaacacatttgttttgtttcattttttcattgttcattgcaagtatataaaaatatagtttttttttgtataatatattgctcctgtaaaaacaaattatgttgcaacactgctgacctcatttattcattctatatcttttggtaatagattctttagaattttctatgtaaagaataatgtcatttttgaatagacatagttttacttctttctttcccatctgaatgtttttctttttttattttcttgactaattgccctggcaagaacctccagcacaatcttgaatagaagtggtgagagtggacatagcaaagatgataatgctggtgaaaaatgtggtggtggtgacagcagtgacagacactaataaccacgggacatgaaaggaaggcccaaattgtttggcagtagctctagttctattttcactaagtaatatacagttgttccttggtatctgtgggggattggttccaggacccctgtgggtactaaaatctgtggatgctcaatcccttatataatggcatagtatttgcatataaactacacacatgcttgagtatactttaaagcatctctagattacttataatacctaatacaatgtctaaacatcacttcattcacatggcttcaacttagtagtcaatgtggggcaaattcaagttttgctttttgaaactttatgaaatttttcttccgtatatttttgattctcagttagttgaatctatccatagatggagaactcatgcatatgaagtattgtaagttctgctgtgcttgaaaattaataaaagcttatttgaacgtttaaaacactttcaagatagtctagatgtctgactgcacagagaagagatacacaacttgaggtgcctgtaccagcactaaggatatgtttgagattcagattggttgaagcttcagtgttgtcaacttagtcaacttcctcccctagaaggaagcggggagagaaagggaataggacagggaggcctggcttagaaatccagttccactacctgctggatcttggacatgggattcaacctatctgccatttccaaaatgggtattataatctttatttcattgtgttgttttaaggattcatggagataatgcatgtaaagcatactgcccagcacatacttggtagcatttggttaatgtttttaattttggagatgtagtgagcaatatcttataactgatcagttttaataaaaaggagtttgtttgcactttatttctacctcttccttacaggtagttggagagcatagtagtaattttctctctaactctccagaattggtgcagaatggcatgaaaacctttcccatgcagcatccaggaaggtaggaggcaggggattgcagcagtgaggagatttggagtaagatactcctgcatacgtgaaatctcacctcttcttcttactactgctacataaaccttcaagcctctcagcttctacattgggaaaatgagcagcacctcataggttgttgtgaggatgaagtaaggtaataagcaagttcctggcgcataacaagcatttaataagtactcattaatactaacttttcatgtgcagtcttatacaatttctgagtaaagcaacattttatgttttgactcaatggagtgaatctattttctggacattcatccatgaacatcataagttttggaatggctaccagttttgtttatttatcatgaaaacactactttcacattataaaaaattattcctccattttgtaaaaacatgactttcatccatttctctgcatacctaaattgacctgagatttcactgatcctttctttaccatttttctttgcttttgtcctctgtaaatatgataattaccaagagtaaaagaataagtcttttcactagggggcatggaatgaatttaaaattcatccacaaaataagaaagttctagtagaaagtttttggagaaaatcttaagagaactctacatcataaataaaatggataggatttttgagaggaaagaaaataccagaagacaccactccagctcagtcattcttgtttaggacttgagcagaatgtcata

SEQ ID NO: 8803 - DNA, 76265 bp, Homo sapiens
tgtctaattctgatacagggagtgggtaaaaattggagactatgatctaatctactgcagcacagttccaggggtggctaattaattgtgtgacttagcaaagattctcctcaggctccaaggtggctgccacagctctgacccaatctctggccactcacacgctacgctgaggtgtggtgatagcgtgaccaaccttcctggtttacccaggaccgagaggtttcccaggatgcagggctctcagtgctaaaactgggaaagtctgggcaaaccaggatgcgttggtcacttgacgtgtgtagcagattgtttctgaacgtttgggggtaactggggcaacatgtgagtgtgtatgtgagagtagtgcatgtgtgtgtgtgcgtgtgtatgtatatgagtgtatgtgtggtgttattccacagcccaagacagcaaacaactaaacactcagtatgacacatcaccaatagaaatggtcatttattggctcctaattccacagaggatgtcacactgggacaggcccccaatctgtgctcatgtcggcctggtctttgccccctctttcaggctgccccctaaaactctgttgtccttccttaattctacagagcaattttgttcaacatcccaactccaaacctattttacataccccaaatgtttaaaccactggcccttggcacaactagactgcagggctaaaaatctgggggcaggtgtgtgctgttggtctatgcagcgttttaaaataattggagccattatttctggcttctcttgagtctaaagatctggccacactaggcatgtatttctacgtggctttagttggctggtactgccagaagctgcttccttttggatggggcagccctctctagttttccattgttcccatccctccctgttgccttcctgatatgactggctcacttcattcatttgcaatacttgctcgaagacttgagtttaccactctctctttagcagcacaaaaacaccagaaacgttgcggtttgggtctctccttcccctccacctctcaacctcgtttagcttctgtaagtggaagaatttattcttgcattgttccagttttagacggcagctgtgcttcctttcgtagctgcagcagccatgaaaacacacctctgggacctcccttggtggagcctgattgacagatatgccatgcttcccagggtttgctcctagccaatcactgggggaagcagacttgttcttgggagacatagggctcctcaggaggctcaaggacaacctgttagccttgaactaacttacttactttctttttctttctttcttttttctttttgacagagtcgctctgtcacccaggctggagtgcagtggtgcggtctcggctcactctaatctctgcctcctaggttcaagcaattctcctgcctcagcctcccaagtagctgggattataggtgccagccaccactcctggctaattttttgtatttttaatagagacggggttttcaccttgttgcccaggctggtcttgaacttctgacctcaactgatccacccacctcagcctcccaaagtgctgggattacagacatgagccactgtgcccggccagacttgacctttctaagaatgcactgcagcccacggtcccttctttcctctgtcccttccttccatttgtcctcctttctgtccctttctcccagccctctctggctccctcttcattttactccctggcactccctcaataagcctttagtatatctcatctcatcttggctctcctggagaacctgctcctaaccgatttggaaaaatcaaaaggtagagaaagagagggcttccaggcaggtaaacagcatgagcaaaggtgtggaggtgggaaggcccagggtgtgtttgcagcaccagggagtaagttagcttgtcctaagaagccatcaaattcccatgctctagcttatcaaaggaagtactacgtgaccttgggtgaagtgactctttctggaccttgatttcaccatctgtgaattcggaataattttactacccattttataggttctttgtggggaataaataaattattatgaaaaagtgtttcagatggcttcagttactaactaaagttagaactattgttacaaaaaaatatttaaaactgcccctctctgttgagactggtttttagccttgaagaaggcaatacacataatattttcctttccggacacagtttatttgtagcctttaggatgcagacatgaatcagacctgatccttggaagagagaaagcaggggtgtagggtagaagggctccctttcccaggcaaaattccctgtgttctaattgggttgggtcttgacattactctcacaaccccacagtggccacagaagagagcagaggcttggtgagatgggagagttgcctagatgtcttgtttctactggacagtgaacatctgaacacactgaggctcctacagggaaatgtctggatgttcgtccctgggagaataaattttcccgggggtccagtttcccttccccagaggagcttcccttccccagaggagggcttagatggcacacttggaagctctctcggtggctccctgctatcaccactaccagcaacatgcccattgcacaagtaaagtagttgaggctcacagattaagcgacttgcttaggtttatatggaaagcaaaacttgcttttcaaatccttgcgtattccagcccttttgccatgggctagaggggtcttccttgggatggtcttccctcatctttattctgaggccatatcagctctgtcctcagcagggtcctttgagtcctcccggggcaggggaattcggaatttctgctattttcaaggcctgcctgttcctccaagatgccatagccagagggttggatgtcctgtcagcctgataaacatagaaagcttacacagtaagcaaagtaaaaataataaaacaaagcaacacttttgaattctcgcatgggccagtcctgcagaggtgctccggatgcatcattgcctcatttggtcctcccttcagccatatctagaaggcgtctcagttgggaatgtctttggctgcaagtattagaaaaatctgactcatggtgtcctagcacagacgtgtggttagctcattaaatgagaaatctataggcaggtggttccagggatggtgattccgcagctctggtttggggctctgcagttttcttggccttccctcataacactacagcccccctcagctcccccactaatcacattcccacacgattgcccccaaagcagaagagaaggcaaataggaaggaaacacatttttctagaagcccgcaacagatatctggaaggtgcccacctcaggacaaatcactagcaaaggtggatttcctggaccagctcagacccatggtgggtcattctctgggaagggggcctggccaccttcctaaacatatgccgactcctgaacaaatccaggaagaaccagaggctcacattcatctccctttggtgtgtgagcagctgcctctccttccctgggaggattttgtctatgggtcgagaagggaagagagtatctggaagagatatttgtattgaggtgatattggtctgcactgaagccaggggtggggagtagaagaactaatatttattgagtacctattgtataccagaccctgtgctgggtgatttcattctcttttcatttaattcagttctcaaagcagccccatgaggaaggaactgttcttcccatttttcagatgggaaaattgagaccaagcctgatcacagataatggagaggagcggaactggtataagcgctaattgcggttaactttccctgatgctcatggtgtgacaggcactcacataggtgtgccccatggaccaggtcgtttgttcctgacctcaactccatgaggttctcttttccccattctgtcaatgaggaacctcagcttagggaggtggagcagtctgcttggggtcacaaagctgaggatcggccaagcccagctgtgaaccccactgctagcagacagccctttggagctccccaaatttggagaaaatcctctggacccgttctatggccttcttgggattgttggcttctctggcagataagctggaaaaataaacaagaggatcagaaaactccttttgcctcctgctgttctgaatctgctgaggccacaagggggtcatccagctgcctcgacagccaacattaagcaggcaaatgaatgaatcttgagtatgatagcaggacatgtgaagtactgccagaaaaaaaaactatcaaaaaaacaaagaaacaaaaatcagtaagaggagatgactgttttagaccaggtggccaaagacagcttctctgcagtgacagctgagcagagatagaggcaccggggaggtggtggaaagagcaggctgtgcgaagaatgctccgaacagagggaacagcacgtgcaaaggccctgcagtgggacctctagggaaagatggggagatcagtgtggctggagcagagtgggtgagggagagagtcgggggcatagggtcaggcaggtaaaggtgagaaggggcggatcatgctggttctcgaagggccttgtcaggaccctggctgataaggatggaagccaggagaccaggaggagcaacagcttctccagagctctgctgggactatggaatgaaacgtgcctaagctcacccggcactgaatgggtggatacaggactagaacaagacctcctgggtcttacctccaggttcagcccatggtttcataaaacttagtgtgccaagcactcaacagtttgtgattccttttagtgtcaagctctcatcacttcctcacaacagccccagaggtaagcacaactctgccctccctgtttccagataatgaggtgagctcagagaggttgagctacctgcccaacgcttcccagggtgggaatggggatggtgggggcaggggcgtggagtgaggctggattgacccccagttctcatcagcaccctggggtggtacattgcagagccgcgggcacagggggctggcaccccaagcaccaggtagcgatgacaatggccaccacatccggaggccctaacgtgcaccaggtagagggtgcatacttcacgggcactatctgtccccaaagcaggtgaggatgaggggactccctgagacacccttgtaccccctgcccagtagttactgaagatactatagggtgcgatataatccagaccagccctcccagcccagaccacagaatggaaaactccaggtccccagcacgcctggggtgggggatggggtgaggaggagccttggggggtttcctctgtctaggtggaatgtggaatgtggtgggaaagctcctcctgacccccttacactcctcctccatgttcgtcccctcccaccacattttctcctcccactgtgccccctcctccccatacctccttggctgtttccccatcgtcccgccgtcttcccacattccctcctcttcccttccccaaaagtcctctcccatcttccccatccctcttccctccccgcatataatctcttccttcctgtaaatcctctccctctcccctcccttccatcaccccccagtccaccacatccccctcagtcccccatctatctcctttccccttgatcactccccagcccaccacatcccttccgccccctccccctccccctccttctcccctcccctccctcccacattttcccccaggcctgagctgcggggagcagggtttctcccagagcgccccggtccgacccctgcggacctcggagggccccatcccccaccccccccaccccgccccaaagcgggctggggtgggcggagtgggaggggcgcggcgggtgggggcggggaactttacctgggagtgggccaggccgccagccccgycagccccgccagccccgccagccccgcgatggcttgggccgcgctcctcggcctcctggccgcactgttgctgctgytgctactgagccgccgccgcacgcggtgagtgtcctgctccgctcggccccgccagacaaagggggcggctcccgcccgggctgcagcccaagggtctcggagcccgcggccggcccggcccgagtcccgctccagtatccygggcaaggcgagaccctcggaggtgggagtcccggggccccgcacgtgggtgagggggccaggccgtgctccccctgccaagaaggtgcaaggtgggaaggtgcggggtccggtaggtcccccggggcgaatcgcccaccgcgacaagtccgagtctggcccttagcgcgacggcagggacctaggagggggtttcaggtgaggaccgagggtttgtgggtggggagccgtgcggggacagcctctgcgtggcccgggtggaagaagcgctctccactctccagcctctgcctgcacctggcacccacctacgcgctgtcaaaccctgccttgctttcggcagtcctatagggatagcctcgctcctcaacccattacacagatgggagtgttgagccagcggagtgtagagcccctgggggatgtcttgatcatgccctggaaccacccaccccgggattccccgtctggaagacgggggtcggtgggcttagtaatttcatttgccagggagaaactgaggcctatgaagtctctaccttcccctgaggtcccacagcctggacagaacggagccagggtcagatgtcacagcctcctggtcccaaaggttttccagctccattgagcatctgtgatttaggagaaaaagtaaagacagcctcaaatcaaggagatagctgtagctctccttttcataaaatattttttaagttaacttgaattgcataaggaatagctgaatacattcgacttaacacaaatatttatcctgttataggtaagaccgaagccccttaaccctcccccagcccctgaagtctagtcctctctccctctctgggcctctcctgttgctgagtctgggtagaaccttccatatttaaaaaaatatactttttatttgagactagtttgggatttacagaaagttgcaaagatagtacaaaaagttcctgtatttctctcaccccgttttccctattgttaacatcttacattgttatgggacatttgtcgccactaaaaaccaacactggtccgttactcttaactaaacttcaaacttcacgggattttatccagtttcccattactgtcctcttttgttccaggatccggccccaagttaccacattgcctttagttttcatacctcctcagtctcccagatgttttaaaaattactcttacataaaaattactcttacatacatagacatgagcttgtagctaatacagagccaygtaagagagagttagtttacattcgtgtctgaaaattccggaaaccttgggaactttttgatttttaaacaatatggtagttgarttttcaaacaataagctcactgtatttttcttcaacctccagacatcttttcagctgaaatttacaactgtgtagtcaatcatttgccttaaaacaagaaaagaaaaagacagtgaataaatgtctcagggaagaaatgaattatttttcctgtcaggctttctcaatacactgtatagaaatgttttcagacattatgttgcttgctcttttcactccagattttagttttgacatctgttctttttgctacaagcagatctttttgctacaaggagatcgaatccattcttttgatcctctctggagtcttccatcatgtgaatacgttatgggctctttttttgtttgtttgtttgtttgagatggatcttccctcttgttgcccaggctggagtgcaatggcacgatctcggctcaccgcaacctctgcctcctgggttcaagtgattctcctgcctcagcctccccagtagctgggattacaggcatgtgccaccatgcccagctaatttttgtatttttagtagagacaggatttctccatgttggccaggctggtctcgaactcctgacctcaggtgatctgcctgcctcggcctcccaaggtgctgagattacaggcgtgagtcaccgcgccctgctgagcctttgatttttatacctgtgggcaccttggaagggtcaacagtgggtagtggggagaagtgtgggaatgagggtcactggcagcttgagggtaggtgcatggaccctggggaccccagtttagatccccaatctcactttctccttccagttcagctagggacactctggttatctccattttacagaggaggaaacaggctcagaaaggctaagcaacttgctcaaggtctgtctggattaaaactctgggctgtaagaatttttagcttttacttttagtgataggatctcacactgtggcccaggctggagtgcagtgtacaattatagcttactggagccttgaactcctgggctcaggtgatcctctcatcttagcctcctgagtaggtgggactacaggtgtgtgccaccatgcccagttaattttaaaaattttgtagagatggcatcttgcyatgttgtccaggatggtctcaaactcagctcaagcratcctcccaccgcagcctcccaaagtgctggaattaccggtgtgaaccaccacgcctggctttgcaagaatttttaattcacaggaagaatgaattctcagtcttcccacacattatactggtaatctgaacactcaaaagtcttagaaccatgtgacttttagatactaagaaatgcaactacaagcaaaaaattcttaaagaaggacaatggccgggagggcggatcacgaggtcaggagatcgagaccattctggctaacacggtgaaacctcatcgctactaaaaaaaaaaaaatacaaaaaaaattagccgggcgtggtggcaggcgcctgtagtctcagctactcaggagactgaggcaggagaatggcatgaagccgggagatggaggttgcagtgagctgagatcctgccactgcactccagcctgggcgacagagcgactccatctcaaaaaaaaaaaaaaaaaagggcaaacaagtgaaacaagtgggtgaccctgatgccgtctgaatggtgatccagtttgggttaaaataagcaaggctctccagctcccttgtctcatttctttatcctgaccaagccttgaggtaatttccatcacccttatcatacagctgaggtttaaaaagatgaagtgactttcccaaggtcatacaaaaattatactccacatctaggcccctccaaaattcrtgcttatcccagtaagacaccactacttctgggagtgagcaactccgtctttacctttagaatttaatttaaaacttttaaattaggaaacatttcaactatacagaaaaagaaaaagaatacggtaagaagccccatgtacctataccttgatttgacagtcattaacattatttaaaaaatattagacataggctgggcacggtggctcacacctataattccagcactttgggaggctgaggygggccgatcaagaggtcaggagatcgagaccatcctggctaacacgatgaaaccccgtctctactaaaaatacagaaaattagccaggcgtggtggcaggcacctgtagtcccagctactcaggaggctgaggcaggagaatggcgtgaacccaggaggcggagcttgcagtgagcggagcttgcgccattgcactccagcctgggcaacagagcgagactccatctcaaaaaaaaaaaattagatgtcatgatattccacccttgaatatttcagaatgcatataaaactgacaactacaattctattttcttgcctgagaatataaaaagataattcttaatgtcatgtagttcccagttcaaattcaaatttctgcaattacagcaagaattttcgagccccattcggtgaacatgarggtggtgagctgagagttaggagtatggcttgtgggccccttgaaactaattgatttgccttgtgagtatcagaagcattcttcctgcttcccaggcctcagtttatctgtacttcgaggtggctcatggaggtggtctctcaagccccagccatatcaccaggctactgcatctcttcctttgggcttgtgtgaccaccacagggagcactgagagagatctcttggttgggaggctccttttctgggggtccggaaggcatagtggcatcaagcgagggtcactgtggcccagtggctggtctgggcccttgcaggatgcagaatttgtaggcacaaataaatctgtctcattctaacatgcactgaccagaggtcacccaacagtggtccgtgactggattcagccctggatgggctgggtttgtgctgtgtgggacatggggagaaaattgggggattccatacacaaaaatctagatttccaacttcttctgaaaaatgggaagatctagcaatactttcctgggactcagtggtagcaccctctctaaaycttgccacagtccccactactccctattgcctctccagcatgcagctattctagttaccactgtrcttcctctgctgttttttcctgtgttgagaaataattctgtgaatttgtgtctatttcaaaaaccagaaaacaaaaactagggcaaggccacgtgctttttatgcacagtggtagcagtgcggggcaggtatggaagagcatctgggaaaccctgttaatggcagactgaaaaccctggaggcctgtgggtgagccctgggggaagaatgggttaagcaggttaaacagaattttgggttgctccagctcacctgtgcaactaagcccccttttgttccccattaaatcctcccagagcttaaggccctgcattgagttgaaatgattgaacagagaggttgggcagtctacccaacattgcacagctgaaccatgccagcctctgctctggacaatctagaagatggactctgtgtcaagtgcttaacctgcattggctttcttaaccctctcagcaactctgggaggcaggtgctgcccattgagcaccgactgcatacatgattcattcagaccagccactgttctgagtgctggagtgaacaacacgccctcccttcatggctcttccatctagtgaagatgcgatacgtcagggggcatggaggcgggtgacatcccatccttgactcctttccctggttcacaaagggtcaagtgggagagagatccagggcaggcgacaggggtcagtgagtgaggaataggccgtttttagaggaacccatgtgatggggctccagtcggaaatcagaaaagatgccttgggatctgacccagggtgggcaggaaaccggctgtgtgggcaggagccggggatggaaaggtcagggcccaccgccctgcccgccagggcctggcagtacctaaaaaaaagtgagrgtgtccgtgggtggggctagagcccacagtccccaaaacagagcctccttcgcccccgctggctgcaggctgagtcaccctggaatgtgaccacggcctgagttggattgagggcccaaggctggaggagccaacatcaggggtcaggcgcctgggctccgggcttcctgcctttgtctgcgcctccttgggacttttctggggaaagaggaaagctgccaggaataacacctggctcgctggggagctccggccacagccaggagaaaggcaggggaagaaagcctgctcccgcctgcaaagatgttttaggagaaaatttcagggcctgcatttgagtaggtctctggaatatctctgcaaaatggaggtgaaaatgcccacttagggtgactgggggccagggtagtgtcaagagggtgggcactgcagccagacctgtctggattagaaacccaagtcctctatgttggaccctctggcatgtgacttagccctctgcacctcagtttcctcctctgtaaaatgggcctggcagtaataattgcttcctcataaggttagggggaggattcattgagtcactgggataaagtcctcagtgtggtgtctcccacaccatcagcgttcattaaatgttagccattatttccaaacaaggaaacgtttggaaaatgccaagtatagctcctgatgtgtagttggcactaggtaaatggtgcccaggaatcttactgctcctgcttctcagctgcttcccagctactaggtgccaggtgctctgtaactcccctcatccttggcacagcccaatgcagtcagtagcattattgcttccattttacagatgaggaaatagaggcatggagaagctaagtcacacagccagcaagaagygtggctgggatttgaagccaggaagtatggtgctaaagtttgggctcatcgtgaccatgccctcctgcctcttatgcaaaaatcactgcttctgggtccagtctgccaggctctgacctgggctggaagggggctgccatgaaccagttattccaaggctacttgggcagcacgacacgtggagacttcaggagaagtggccttagcccaggggctcacaaaaagatgaggcacaaggmaaggccctgcacctccttagactcacagagctcaaatttgcaagtctcctctttgactagagaagccgggatgggctggggagaggagggaatggttgggagaggcacttcctaggccctcaaatttcatctttgsttctgctcccatccttcccagccttggccctcaaatctggccatttgctcctgyccacgagctgtcccaccctttgggttatactgggggcagccaggtagagggaaaaagggagcaggagacaggggcagagggaggtagagagggagggggaaaggaggaagagaagtggctgcttccctgaactgctgggtgtggaacaaaaggccctgtgctgaaagtgggagactcagatgttaggtctggctccccggggaccatggccattgcttccaccacattgctctcctgggggggtcacggtagttccctgacacatctccttccttcctcttgtctttctctggtatgaccctttaaaggtgtggtcacatcacttactggctcctgctgcaaaccctccagtggatccctgccacrcgtggcataggagccggactcccaccttggccttggccctcgtggtccacaaagtcatctccagcatcatcgcctacgtctcgtccccacattctccactccagccacgctggctcctgctgtctcgaaaacctcaccgagcatgctcccaccccagtacctttgcacttgctgttgcctctgcctgtaacactcttctccctgcccctcccagagcactcccttcacatccttctggtctttgctcacgtggcatctcctgaggaggccctccttgaccaccttttgtaaaccagcccccctcactgtctcacaccaccctgttttcttttttctttaatggaatataattcatatcccatttagttcacccttttgggctgggcatagtggctcatgcctgtaatcccagcactatgggaggctgagacagggagtgcttgagcccaagagttaagatcaacctaggcaacacatcaagaccctgtctctataaaaaaatagaaaaacaaagtcaggtgtgatggcatgtgcctatatatagtgccagctactcgggaggctgaggctggaggattgcgtgagtccaaacgtttgaggttatagtcaactatgatcatgccacggccctccagctccccttttaaagtgtataattcggccgggcatggtggctcacgcctgtaatcccagcactttgggaggctgaggcagatggatcacaaggtcaggagttcaagaccagcctggccaagatggtgaaacccatctctactaaaaatacaaaaaattggccgggcgtggtggcgggtgcctgtaatcccagctactcggcaggctgaggcagagaattgcttgaacccgggaggtgcaggttgcagtgagccaagatcgcgccattgcactccagccttggcgacagaccaagattccgtctcaaaaaaaaaaaaaaaagtgtataattcaatagtttctagtatatccaccgggttgtgcaatcatcaccatcatctaattccagaatattttcatcacccctaaaagaaaccatgtacccattagcagtcactccccatttccccctcctccagccctgggcaaccactaatgtactttctatctctattgatttcccaattctggacagttcatataaatgaattaatacaatatgtggccttttgtgtctggcttctttcactgggcttaatgtttttaaggttcacccacatcgtagcatgaatcagtacttcattcctttttgtggctgagtaacgtttcgtggcattgatacaccacattctgtttatccgttcgtcactcaacgaacacttgagttgttttcacttttcagctattacgaataatgctgctgtcacccgaaagcggtcctgatccagaccccaagagagggttcttggatctcaggcaagaaataatttagagtgagttcacagagtaacgtgaaagcaagtttattaagaaggtaaaggaacgaaagagtggccacaccatagacagaccagggcgtttccgaaggcaagaggaggaatgtgtctgccttagttacaattcttcttgtttatatagaagataaaaatcatgggagaggtgtgctcttctaccacaagggctggggacaaaagattgttacctaacaatcttccataagaatctatattattatctttaaagcaaaacttattcttaaactaagaaggcttttgttcataaaatatygggacagcaggatgtttcctgggtctgttaagtcctggatctgttaagtcttgggtctgttgggtaagcatgatttaacrtgttcccttgatcgtaaacatcctgcgcttaagaatgcctagcttcctggcccagcatggtggttcacrcctctaatcccagcacttggtgaagcggaggcaggtggatcacctgagatcaggagttcgagaccagcctgaccaacatgatgaaatcctgtctctactaaaaatacaaaactagccgggcatggttgttcattcctgtaatcccagctacttgggaggctgaggcaggagaatcacttgaacctgggaggcggaggttgcagtgagctgagatcgcgccattgcactccagcctgggcaataagagcaaaactccatctcaaaaaaaaaaaaaaaattgtctaacttcttcttgggattgcagcccagcaagtctcagcctcattttacccagctcctattcaacatggagtcactctggtttgaacacctctgacactgcttacgaataatagtgtatacatttgtataagatccaacgttttcaattctttagggtacattgctgggtcttgtagtaagtctatgcttgacgttttgaggaactgccagactgcattccaaagcagctgcacgattttacattcccaccagcaatgtatgagggttctcacttctccacatccttgctaacacttattttcttcccttttttggtggtgggaacagggtctcgttctcttgcttaggttgtagtccagtggcacagtcacagctcattatagcttccacctcccaggctcaagtgatcccccaaactcagcctcctgagtagctgggactacaggtgcacaccaccacacctggctaatttttgtattttttgtagagacagggtctcaccatgttgcccaggctggtcttgaactcctaggatcaagagatcctcccactttggcctcccagagtgttgggattataggcatgagacaccatgcccagccttattttccttttttaaaatttttgtttttattatggccatcctggtgggtgaagtggtacctgtaaaccaaaaagtgtctgagacaggtctcaatcaatttagatgtttctttttccaaggttaaggacatgcccagtagagaggtctgtgcctttctccaaagacgactttgagggtttcaatacttaaagsgggggaaaggtgggctgtaagagaaagagggaaggtatggtaatccccatgtcacaagagaaaaggaacgggtagggcgatagtcaatgatgtatttctctcatgcacagtaaatcagcactttacataaaataaggtgaacatagagtagctgcctatggagatactgaaacttttatctgtagctatctgcttaggaatagtaggaaaggcagcttcttgcatgactcagctttcagtttaattttttcctcatggcagagtgaattggtgtcctgagtttttattttcctttctccccggttttcttttctccctggttttcttttcttttcttcttttttttttcttttctttcttcctgcacgttttttgctctgcagcctcaaccttccagactcaagcgatcttcctgtctcagcctccctagtagctgggactacagacatgtgctaccatgctgggctaatttttttaatttttagtagagacggggtctcactctgtttcccaggctggtcttgaactcctaggctcaagtgatcctcctgtctcagcctcccaaagtgctgggattacaggcatgaaccaccatgtatgcctgccccccttttctatttaagatcttttggagaaagcattttagaagaaaatgaatctccggtctcaggttttgtctgatctctcatgtctaggatggtttatttctagacgaataggtcccacattgttaggaaagctcagttttagtaggttgtgaagtctcacatcacacaaagaaaataagagagaaagaaaacaggaaaaaaggaggaagtaagcagataaacaaaaaagaaagaacgaacctggaaaactgatagaggccatattactctcaagtccgtatatcagtaggcaggtatgaaaatgatttstgcatataaagagattgcttttattttcttccaaagtttaagttcagtttatagggctttaagaaaagcacagcttaacttttagtgatttcacatcaggaaaaatgaggggaggaaaaaaaaaagaagggaaaacattgaaaacattcttttggagacttggagccaggagaatttttagaattcagtccaaattgtggaaaataataaaaayggaaaaacattagacaagtctagactctaataacaggtgtactatagttaattttgaaacatgacttttctctctccaattccccaattttattaaagacaaaatcatagtaggaccaacttatttgtaaaataagttttagttatattatacttggcttgattattttcataaaatgcagcaagactgatcatttgccatatgagctctctcttctttttaaaattggctttgctggaagcttttccataaggaatctgagtctagacctttttaaaagcctcacacccagccaaggatttagctgtgcctgcagatacctgtatgaattgagtgaattcaaaaagtgacattctttgctttccacaggtcaggaccctgtaaacracagggtatatgaagccagtttttccaaggtgcttttattagctctatagttcagccttattttctcaaagtagtctgaaaatatgtcattccagttaaagccttggtaaaataaccagtgtctccaattatgccctgttataaaagaaaaaagatacttaggcaaataactacattgccataaattaagaatactcacaaatagtttccaagttttggaaaaaataggtaaagagaaagaaattctgttttaaatttttctcatgagagtatactttactgaattgttaaaagctataaatagcttaaaagaagagaaagttttcttgactctgtaaaacaaaacaaaaagaatcaacaaatgttttaaacaaaaactcataaaagattatttcaatctcctgttagttcagttcatgcaattaactcctgttctgctcaagatgggattagcagtcctcatgaatacatcagttctccatgacagtcctggaagtttttctccctattccaatggcacaatctctaaggttgtcagaagcccatgtttaagagtactcctcagagttctatagctgattataaatcacctataaaaagatcaaactaaaacaactgtggatgacaaaagtcttagaacagccatagttaaagacacaattgacaaggaaatttggttacgtctgtggtattcaatagttttacataataatcataattactactgatgatgtatactaagtcatatcagaatcacaggaatctcatacaattttggaacacatactcatttatataagcaactcatttatataaatataatccaaagaagattaaacaccatttcatatttgacaatgcttcctgtatgattttattttaccaaataagccgaatatgtctcttttggacttcagaggacctaatgccaaaaaattaatgaggtcaaaaggactgaattgactattttattttggaaagtttgtcaaatatagaaagtttaaaacacttgacatcacaaaatagaatcacaggttattgtaaaataagtcattcatttagccaaaggtataactcagagatttcagaaaaaaggcaaaaacctttattcttttttttttcgagacactctcactttgtcgcccaggttggagtgcagtggtgcaatcttggctcactgcaacctccacctcccaggttcaagcaattcttgtgcctcagactcccgactagctgggattataggcacctgccaccacacccagccaatttttttgtatttttagtagaaacggggtttcaccatgttggccaggctggtcttgaactcctgacctcaagtgatccacccgcttcagcttcccaaagtgctgggattacaggcatgagccaccacacctggcctaaaaacctttattctttgagagaggagacttaattttccaaataataagctctaataaatacagcatgaggccaattaaatcctgtttctcaaatcttataaacaaatctattaaattttaatcatcttgaccctaagatgtaatttccataaaccattttctaaacttttataattttttaaagggtgggataatgcttcaagaaaaccttgttaatctgacacaggagcccagatgctggtcttgcatcagtgtgcctttgatgttaatgtttaattaatagagaaactctgaactaatttaatctctcagaatcagcccttacaatctcatatgcccacctcttccatgatagtccctgggcctagagaggttgaatagttttcatttctggctccatgtctcacaaatgcagcttattttgaatgtcatctcctcctaggtctgaagatgatgctttaactgctgtcagtgtttaagatttagcaggactcagtgtcctttttagacccaggagtcaaagccctgtaactaaacagcaccaggactttaaaaacattacagaaagttacaaggatgtaataaccttcattaaaaatttttttatatcagctttcctaggcaaatcaaaacacagaacaatttagacatattaagaaatgccaggagcacagaatgttatattggatgaaaacatttcctttagacctttatgataaagcatttttagcatcaggctacaacagttaggacctgagggaaaaaatttatatgagctgacgaaaatgttgatggagagaattattctctcagtccttctcaaagaggagagaaagctgaaaatagcaagatgcaataaaagttgaacttttgagttaaaaaaattaaaatctcatgtaatgttattaacagtaaaataayaccttaagaaaattttgttctaaccaattctttagtgtattagtgcatttttaatatcaaaacccaatctctagaaagactattataaataatttccttttaattatagtcaacttgttcacataaaatgtttttcataaattctctttttataaaccttattatgacttacacaaaccatttacaacatgcttcctgttttatcctaaacatctctctttcgtaaatgatcaatcattttattttaggacaaaaaatttttacgggattctttccatatacaattatttttcttttaacctttcttgccaaagatacccctttataattttctttacatgcttcttatttacttattctttttacgttgtttaataaacaacctttgaattagacaaaactatttccttttaataagaacacttttttaagaaaaatgtttttctgtaactttttaaggaaaaattggaaatgacccagacatttaatgggtatctattatttaatttaatatcactttagattctgaattatatgacatttatttataagcatttatttcattacatttacctaattaattttttaaaatagtttacctagattacttatgaaaactgtgatagtcactatttaaagttatttccctgttaatcatttttatagctgtgaatttcagatgtttacttaagtaagaactttaaagttaaatacatgtgtgttttttgttttttgccaataactcaggatttaactgttttcattaaatgaacaatattaaatgccttatttatcaaaaagttacacaatgataattctcttttgggctggatttatagcttcataatcctcatgccaaattttgtcaccttataatatctagcagagataaatatataaccccttgactaatacatataaaacaataatgtatattgacaattctgaaaccatttctaattttattttaccaataattttaaaaccagcttatttgttaaagatttacttaagtcatgtgagcttgaaaaaccatttgggcttaaagtttctatttttctgataaagtatttgatttttttctttaagccaatttattagacctcttatgtatttttttgtagtgaaacattatatacaggacatataaatacatagacagacaggcagcagtagatctgataagattcataagacccctttttttctcctgttataaagctcctggcttttcttaatatgtctaagttgttttatgtttttatttgcctaggaaagctgatataaaacaattttaaataaaagttattacatccatgtgactttctgtatcgtttttaagtcctggtgctgttaagttatagtgtttgactcctgggtctaaaaaggacaactatcttagacttccaatttcttgataacctgtttcattaccctaggcaattgtcagccaaacttgcatactaaaggaacaactcttgggtgaaaatcagatagggaaatgtatatctctaaagagagagagagacagacagagagagagagagaaagaaagagggagagagagactgggtgtgttagagggagattaaaaatggatgccaagccacaagccaaacataaaattatagaaatcttctgtaggattttatgaggagacaaactttatttagataggtagatttaaatttagtctctgtcttttaactggacctctgagctctgggcagagtccacactgaatcctgggtctctaaaaggagagagatatcatgagactaagccatgtaatgcttttacagtgcactttgttacaaaagcatttctctaagtattttaaccactccctctcttaaacacacaagagtagttcctgtagtaatagctattttagttaataaaaaaaaaagaaatcagataacgcaatacaaaaacaatcagtttaagatctgagaggaacttgtctttttacactcttagggtttcataaggaaaaacagaggtttctccccagaaggagtctggcaccttctctgttttctttaaggaatcccaggctgttagaaattattttaggtcccttatgcagcagagggcggcaagaggaaggagagacaggcagaagtaaatggagaaaacagaattcagtcgactgggaagaaaaaatctttttctcaaaaaacaagaacctaggagagaaaaaagaaagcataaaggcatacacacacacacacacacacacacayacacacacacacamacacatacacatgcatacacacacatacacaygcatacacacacacataaacacacacacatacataaacactgctgacaaaaagagttaaactctgtaaaatatttgaggagatttattctgagccaaatatgagtgaccatggcctacaacacagcctcaggagatcctgatgacatgtgcccaacgtggtcaaggcacagctcggtttgtacattttagggagacaggagatatcaatcaaatacattgacaatatacatttgtccagtccagaaagacaggacaacttgatgtggggggtgcttccaggttataggtggattttaaaactttctgattggcaattggttgcaagagttattgtcaatagaaataaatgtctgggttataataagaggttgtgaagaccaaagttttctcatgcagatgaagcctccaggtagcaggcttcagagcgaatagatgtaaaggtttcttatcagacttaaggtctgtgttgatatgaatgctggagggtataatgagtcatgtctgacccccacttcccaccacggcctgaaccagtctttcaggttaaattttattttattttttttgagacggagtcttgctttgtcgccctggctggagtgcaatggagcaatctcagctcactgcaacctccycctcctgggttcaagcgattctcctgcctcagcctcccgagtaactgggactacaggcatgcaccacgaccatgcctggctaatttttgtattttcagtagagatgacgtttcatcatgatggccgggccggtcttcaactcctggcctcaagtgatccacctgccttggcctcccaaagtgctgggattacaggcatcagccactgtgcctggcctgcactttaccatctacaaagcaggaaaaaaaacttcaaacttgccttccttgttggaagtgagttgaaactccagaagggagttacgtgctctccatcgtcatggaagcaggaaaacttgccttccttgttggaagcaagtaatactccagaaaaggagttgtacaacaaaataaaacttagctctcaaattgtagctctcttagatctcaaattttcagagattcgggattctctgcagcagggagctcccagmcctactggtttgaccaatgaagacagataccaagctgttaccaaacaccaacaggagatttgtcaaaggccagggccacctacatggagtcccttcatggtcgccaatttgtaaactaaaaagtatctaagctaggtctcaatcaatttagatgtttattttaccaaggttaaggacaatgccagggagaagaaaaaccacagaatcacagaaacagtctgtggtctgtgcctttcttcaaagatgactctgagggtttcagtatttaaagggggaaaagtgggctggaggggaaagagggagggtgtggtcatccacatgttacaagagaaaaggagcaggtgaggcaatagtccccgagtgctccattcagattacctccccgactgctccattcaaaatcacactctgcaacctacactctttatgcccttccttgccttatcaaatggtgacaagtgccatggcttctgtaggcgacctggtgagcctcccctggacctgggcagcatcccctggttggggtatgccttggactttggaaaagatgctgccagcttcctcacgaggatgaaggagaagcacggtgacatctttactgtaagtgcctcttgtgcctcgggagggatggggatgagcagctgggcctcatatctggtttctgttgattccttcaacatatgtccctatgccaacccccccaccccaccatccaacatccatctgagtggtcgagccaactttctatccagctgcctgtccagctgcactctcaatgctgacctaacatcatcccttcagtctccctcttgctcttcccagcgtggagttatgcagtcactcaatatctatccaatacttgtatatccatgcagctgacctccatctatccattccatttccatccgttcaacatccatcttcccatcccattcttctgcctgtccacctggtgtctactaagcgtccttccatccttatatctactcagcattcattcgtcaacctccgtctatccactcacccatcagtttttccatagattcacccgacatctgtcaattcatttatccatcttctatcccttcatgtgtctgcccagatctacccagagttcttccactcatggatccaatgttcatccaactttcatctgtatacagttggccccctgtatccatgggtgggttccatatctctggattcaaccggccacgaattgaaaatatttgggggaaaatgtgttggtactaaacttttttagacttttttgttgtaattcttccctaaaaatatagtttaacaactatttatttagcatttacattgtgttaggtattataagtaatctagagatgacttaaagtatatgggaggatgcatgtaggttatttgcaaatattatgccattttaaatcaaggacttgagcatccatagattttggtatctgcaggaggtcctggaaccaatcctccatggatactgagggataactggtcagtttccaccaactttcatttttctgtttatctacgcatctttctgttcatctgccactatccacccaacactcagctatattcagtattcgatgtctccccactggatatacatctatttatatctcatccatccatccttacaacatctattcaaacgaccaccacccacccaccttccatgtatccttccaacttccatccaatcaacattcatccttcactttacccagtatctacctagcattctctcatccatgtacccaacatttattggtacatttggtttccaaccaacctctagctgcccttccatccatctttccatccaacatagattcattgatctatccttccatttatccatctatctaacattgtatccacaagtatttacccagcaatttccttccttccttccttccttcctccctcccttccttccttccttccattcatttacccattcaccaatccatccatctgcccatttactcttctacaatccacccactggaatttacccaacagcatccatccatccatccatctattcatccatgtatccattcattcttccttccatccatccatccattctttcatccatccatccatccacccatccattcatccatctacttatccatccatccttccttccatccatccatccatccattcttccatccaaccatccatccatctatccattcatccatccattcatccatccatccatgatgtgcacaggatccatctgccgccttctctcctggctactggagatatggcaataaccaagataatcatggcaggtgcttaagagtgaggtggtagagaacacagtctttgattttaaaaagcctcaatattcccaaattccagtcctagtcctgccacttctcagctatgagatcttgggcacatttcttctcctttctaagcctcactttttcagctataaatgggtgagtgatggtccctacctcacagggtggtaggtggtagtgaggcatagataagagaacatagtgtgttactgtccagtggggcagtgcctggcacacagtaaggccctgaccactgagagcggctgctgttcacagtgacactcctcactctatccctggcaacttcccacagatactggttgggggcaggtatgtcaccgttctcctggacccacactcctacgacgcggtkgtgtgggagcctcgcaccaggctcgacttccatgcctatgccatcttcctcatggagaggatttttgatgtgcagcttccacattacagccccagwgatgaaaaggccaggatgaaactgtgagtggctggagatggcacctgtgggagggccagggtgggcgactcatttctactcatgtggcccaagttattcttggttccaaagcaaatgttcggtaaagacattttgtcttgagaacacaaacagaaacaaaacaaaaaacaacccaaaagaattgggtggaagaagaactctttgtctctcatctctggcgggtttttttgtttgtttgtttgtttgtttgtttgtttggaggcagccctgattttagtaggaggagaccagggtttgggtcagccacacctaaattcaaatcccagccccatcactccctagctttgtgactttggacaaacctctttccctctctgagcctctgtttcctcctctgtaaaatgaaggagagaggtggaatgatgaatatttctgagtccatactctgccaggcagcatgcattatctcattagtcttcacaacaatgctggaggctaagtaacttacagccccatttcatagatgcagccactggatctcagagaagtgacttgtctcaggccacatagccagaagtggtacagctcctgaaacatatggaggaatcattttattttatttatttatttttgagacagagtctctctctgttgcccaggccagagtgcagtggcataatcttggctcactgtaacctccgcctcccgggttcaggcgattctcctgcctcagcctcccaggtagctgggattacaggcacgtgccaccacacctggctaatttttgtatttttagtagagacaggatttcatcatgttgtccaggcaggtctcgaactcctgacctcaggtggtctgcccgcctcagcttcccaaagtgctgggattacaggcatgagccaccatgcccagccacatatggagtcatcatatcaataagagaacagatgaacatgtttgctctgcattcattcagcagacatctgaggacccattgtaccctggtcattgccctggatgtagggtgtgcagaacggtgccaaccaccatttgaaggcagctattataggccaggtgtctgataggctcactttcatatctgtgcattagcctaaagaggtgggcatttttatccttattttacagatgaggacactgaggctcagagaggtgaagtgacttgctcaaagtctactgctagtaagtggcaggactgggatttgaacccaggtccactgacttcacagcgcattctcyttcatctaagataccaaggctgataagaccctgtgtccgcccctgcagagttcacacagtccaatggcgatcttcagtgatctgtctccaggaggaataccctctggaggttaggaagagcatctaggaaactgttttgcaagatagttaaggctgaagcaaggccagcatgatgaagtggatgttgatgagacatgatgcctcctctgaaccttggcctgggggcagctgcttggagcctgagtgtcctgggtcctgacattccagggggaccctgggggtcccattagcaataggaatccacagctcactgaatctgcccctgctacccagggaggatcccagtttccttcagtgtttgcctcaggaattttctggaatttcttacaagctggcgtgatgtcttctgggcacagcagccacatctgttgagggcttgtctctgctgaggaccagcgcttggagtggggtggggagaagagctgggtcagggtccattgaaggccagatcccatgtattgagcacttacaatgtgccaggcaccgtgcggaacccttcacatgcattgtcatacatgagtcatgagccatgtctgtcgtttttcccactatgttccaacttgaacatcccaaaccttttcatacccaggagttcatggacgccctgtgcaaaccctgccctggtggattacccaggcacttctggcttactcagtctaaaggtgtccatcctacttcccaaacagcaggcatgacagatcagggccctgattggcactctcccactgttcttgttgctgccactaggtgttgctgttgaccatgggctgtgcaccgcccatggacaccccacttcacttgctgtagggatatcctttttggtccagatcctacacaaggagcagagaggccttagacttagatgcaagatacccctttcttggcttctaatcatatcctcagtcatggctcagtgtagactccrtatcatggaggctcagtataggggagcttccagcttctgccacactcttccagacggggcctctcctcactctgtgcaggtccacacgatgggaccagatctccagcccacatccctttttccttgtgtcactctcatgtgaggtcatgtcttttttttttttcttttctttttttaagacacagagtctcactctgttgcctaggctggagtgcagtggtgtgatcatagctcactgcagcttcaaactcctggactcaagcaatcctccccacctcagcctcctgagtagctgggactacaggcacctactacacatctggctagtgattctttgtgtatttattctatttttgtaaaggcagaatctcactatgttgcccaggctggtcttgaactcttagactcaggcgatcctcccacctcagcttctcgagtagctgagactacaggtgtgagccaccacccctggctaatattttattttttgttgagatggagtctcactatgttgcccaggctggtcttgaactcatggacttaagtgattctcccaccttggcctcccagagtgctgggattacaggtgggagccaccatgcctggccagggtcacatcttattggcagtcctgagtcagggaacaccacagctattccaacagatcttcctatctttagatttcagggagagatgagttgcttttcagttccttctcttccagaacgctatgggtcccttatccaagctgtgtgccttagggagggaaagactctcctggttaagaattcagatgctggagttgggcagaccaggatttcagtcccgctttggctgtgtgaccttgggcaagtcactttcctctctgtttctgagtttctccatctgtaaaatgggtgtcataatagtaactcttattcccaggtttgtctgaagacgaaatgagattaggctcagtataacagatgggaactattgttgacgatgacagtcataataatatcctcttatttaagctactcttccgcaggacctctttgccaatggggagcttgagctctgggacccttaggtttggggagggaggtgcctgtaggtgtgtatttccctttggaagccaaattttcatgcttttgtttcctgcctcaggactcttctccacagagagctccaggcactcacagaagccatgtataccaacctccatgcagtgctgttgggcgatgctacagmagcaggcagtggctggcacgagatgggtctcctcgacttctcctacagcytcctgctcaggtgaggctgtgcagcccccaccctcctgctggggcccggcactttgacctgtgtcagccatgagcagtggccaagggaaccgtgaggactctgtgggtgggggaagcaatttgagacacccaaagcaaagactgtaggaaagacgccatgcaccagggccccggctgttcatctgacctagctcatgaactgtaaaaggagacactggctggaaatgggaccttacaggtcattcagagaggaagtcacagagcaagacttcagaggtcatcttgtcctgtggcttccagactttgggatttcacagaacagaaaacaaaatgtttgggagatcaacttgggaccttaaccttttatctggtcttgtaaatgtatgttaaaaactgcacaaccgaacgttccttccttcagcagtgccgggcactaatccaggctctggggatacagcagggaacaggacagatgaagtccccaaattcacacagctgacactccagtgggggaggccgaattgagttatgtcagagagtgataaacacgatgacagagatccacgggtggggtgacagcatctggggggctttcttaggccgactgacgaggcagggtcatgctctgggggtctggcttctgagccaagacctaactgcaaagtgcccaccacgccaacactctaggcaggggaaacagcaggtgcaaaggcccagaggtgggaggaagctcagagagacggccagtgtggctacagcataaagagccaaggagggaaggtggacaggaggtcagagaagtgggcagaagcaggcctcaggcagtcgggaggtcagggaaggctttggaaattatgctgagtaagatcgggtgacatcaggggtttgcacaggggcaggacatgatctaacttagtttgaaagccccctctggctgctggatggaggatggactgtaggggtaaggaggggtggagagggaggcaggaggacctagcaggaggctgccaggtgtcaccaaggtgagagaatggtggtggcccagggaggtggtgagaatttgggtagcttttggagatagagttcactggctctgccggaagatttgactggggcagcggtggggatgggggagcgtgggcgtgagtgagagggatagagtggtgttaaggacagctccctgattttagtgatgcccttaaccaaccagaatttaatttaatttaaatttaatttaaaaaaggacatttcaacccctccaagaaattagagcaacatagttctaggataaagggcagtcattcgttgacacatatgggcatgtgggtatatttatgatatgtgtgtgcatatgtgtagactcggcgtgtctcagctcttttaatgctcacaatcgctctaggaggctaggactttacmtattccatttgacagatgagaaaactgagacctggagagcctgagtcatttgcccagaggcctgtgttggggtcaggacagggctggtcccagagtctgcactctcagccacagctctcagcacacgaacagtccccattctttttgttttgccctggggtggtgcaaacagtgtcaagggctgtaattggtgtgggtgatgctggtctggtccaccctgcattgtatgatggggactgaggtccagagagggccagctgaaaccacccagcaagttcacagtagtgatcctcccaggtctcctggctcctgggtccctgtgcagacaaagaagtcagagagagataggctggggagaggcaggctcaggggcagctgggtctggctaggctccatggtacagcggcaggcacaggggaatcagctcagggggaatcagacgtaaatccatacctgtaacccggtaactgtgtcttcagggcctgaggcctgggctggagctcctgccccctggcttggcagctgtaggcctttccactgccatcaatcagcagcccctgaaatacaaagagaatgggccagttggatgggagggacacagaggtgaaaggggtgccggttcaggcagcccgaactgtgaggtgccacctcttacacccaccagcctggcctgtgttggccctggcctcactgagtcacacccaaagttctcctctgtcctcaccttgtagccctggcctcccctcctcccacctacctctctgctgccccttgagcaggtcaggcacgctctctctttgtggcctttgctatttctgttcccttgcctgggaatgctgttccccacaggtctgcgtggctcccaccccacttcgtttaagccttatcgcgagcgccacctgctcagagaggtctttcttgagtcccattttcgtgatggctccctcctgtgacccagcttggttcagctttatttttctttgtggctctagcgccgcctgtgggtcgtgtgtgtatttacatatgggattatcctgtcttcagccgtgctcttttgatatggagctgccggcttcgcttccacagagcaaaaccttgtggtcctctgggtttactttttctttttgttttcttttccttcattttattttattttattttaaagacaaagtttcgctctttcgcccaggctggagtgcaataatggcgcgatctctgctcgctgcaacctccgcctcccagattcaagcgattctctcgcctcagcctcctgagtagctgggactacaggtgccgccaccatgcccagctaatttttgtatttttagtagagagggggtttcaccatgttggccaagctggtctcgaactcctgacctcaggtgatataaccacctcggcatcccaaagtgctaggattacaggcgtgagccacctctcccggccggtttacttttttggtttatttttcattgcctgttttggtagaaatatatgtaccgggaaatggttctctgagttagcaaaaaacaacagtgcaagtgtgatgataaatgatgaccagtgtcaactgcagtgtcaccgagaccacagggccttgggagtaccgcagtggcctggcaagcacgtgtctgtctaaaaggggcggctgcaactctgctcctgctaggtttccaggtgggaccgcaggtcagccagattcctttttcaagatgagatgagcaggaaatccggattttgtgtgagtttccccaaatgtttgaaggaagctttagtttgtttttaggaactcccttgataaaacacatttgtggactgaatccagtgtgtgggctgcacctttacaacttctgccaccactgtgcaggtgagggacagagcagggaccacgcaggcctctctcggcccccacctaccctcattcctgcttccattctctcttcatctgggaaaacccctctcctgagagatcctggtctctggtctttgtctgcacagggatccaggagctcaaggggagggtgagagggtgaggccccggggctttggttgcgtctctttgttgtgactctctgctgaggcagagatgacaaaatgaaagcctgcagtttccctcccaggactgaggtcagcccgctgggctggggctggactcctggggcatttaaagggggctggaggtgaaggcgcgtcctctgagcgtggtcctgtgtgtgtgcgtgtgcgtgtgcgtaagtgtgcctcagtgagagcacatgagagctcatgctagctcccatgtcttaccctttttcacacttgaccaggccctgacctccttctcgggcctcccagagcccctcagatcaagcacaaccttctcactgctgcaaatgcctgccttgcgtggccagccctgacagcccaggccctcccatcctctgcctcacaccccggctccagtgcctgcaccagccacagctggcacctctcccaccaggcacggttgcactctcagctctgggcctttgcacaggctgtgcctgttgcctgaacacgttcctcttctgcttcccccgatcatcctgcagatctcagctcagaccctcccttctctaggaagtcttccctgaatccctccctgggagcaggcatctcctccccttctctgtgcccccatctcagcaccgtcccctcgagctctctgctgcagcctcatcagcctccttgctgctccccagcaccgggctccctcctgccccaggacatcacacctggtgcttgctctgcttcctacccctccctctgctctgcccatggctgactccttctcagccttcagctgtcagcttgacaccagcccctccctcacctggcacctgacaccacagcccccgccctcccatcctgctacccagctttgtgtctgacagtgccgcggggcaccagctggcgcattattcattttactcatcctctcgtctgttgtctgtctccctgtgctgagaggtcagctccttgaggacagggatttttgtttttttcactgccgactgttcagtgcccagaatggtctttggcgcacagtaggattagtagttgctcactgggtgtatgaatgaagctcttgtgagtagckgtggccacacatgagtgtcccaggaggacccctgacmctctgtctgccgcccccagagccggctayctgactctttacggaattgaggcgctgccacgcacccatgaaagccaggcccaggaccgygtccactcagctgatgtcttccacacctttcgccagctcgaccggctgctccccaaactggcccgtggctccctgtcagtgggtaagcaccatgggggccccagtgggtgggggggaggatggaaagacccagagggggagcccaattcaaggtagaggaccagaggcaacacaggcagaaagacatccaatgcccagggaggcagtaagatccccatcactgggggtatgcaagagcgcaatggtggggagccagggcttggaccagagcttgggttcctggtggaaattctgattcagcacatttagagtggggctggagaatctctgtgtgtgtgtgtgttcctttttgtgttttaaggtttgagttgctttaaaagtttttacaagtagttcgtgctgattataaaaaattcaagccrtatagaataatttacagggaagaataaaagagcgctccactttctccccagcctcagcccaccacttccctctacagaggcaaccaccatcactagcttggagtacatcctgggagcactttctctaaacagacacacagatgtgtgttatttttatttttattttatttttgaagcttttaacttcttgttttttactgaggtataatttatatacaggaaagcacacacatctaaacgcactgagaggccaggtgcagtggctcacacctgtaatcccagcactttgggaggctgaggtgggcggatcacttgaagtcaggcgtttgagatcagcctggtcaacatggtgaaaccccatctctactaaaaatacaaaaattagccaggcatggtggcgggtgcctgcattcctggctactcgggaagctgaggcagaatagcttgaacctgggagttggaggttgcagtgagctgtgatcacgccactgcactccagcctgagtgacagagccagactctgtcttaaataaataaataaataaataaataaataaataaataaatgcactgagaagtggatctaaacattttatgctctttcccagccagtattcacccctgcgaggtagccactggactggtttcttttacctccaattagttttgcctattcttcagcttcctagaaatggaatcacacagtatgtgcccttttatgcctggcttctttcactcaacttgatgttgggagattcatccaggttgttgtatggatcaatagtccagtttttatttattttttgttttttgtcttaaaaacaatttttttgagacggagtcttgctatgttacctatactggtcttgaactcctgggctcaagcgatcctcctgccttggcctcccaaagtgctgagattatgggagtgagccagcatgccttttttttttttttttttttttttttttttctgaaccagggtctcactctgtcacccaggctggagtgcagtggtgcgatctcggctcactgcagcctcaatctcctgggatcaagtgatccttccccctcagcttcttgagtagctgggactacaggcatatgccactaggcttggctaatttttaaatttttttgtagagatgaggtttcactatgtttcccagactggtctccaactcctgggctcaagcaatcctcccacgttggtctcccaaagtgttgggattacagacgtgagccactgtgcctggccaacagcttgttctttttattgccgtatagtatttcattaaagaaatatgccacaatttgtttatccattcctggttgatagacatttgagtagtcccccatttggagctgttaggaagaggttgttgtgaacattcttgtacgtatctttcagtgcacacgtgcatttcttttarctgttggcctgttttttgttttgtttttgtttttgtttttttgagacagagtcttgccctgttgcccaggctggaatgcagcggcacaatctcggctcgctgcaacctctgcttcccggggtcaagcaattctcctgcctcagcctcctgagtagctgggattacaggcacgcaccaccacgcctggttattttttgtatttttagtagagacagtgtttcgccatgttggccaggctggtcttaaactcctgayctcaggagatctgcctgcctcggcctcccaaagtgttgggattacaggcatgagccaccacgccctgcctagcctgtacttctataacttagatatatcacactagaagaattgttgtaccgcttacagctttcactcaactccctgtctacagcatttccacatcgatttgtaaaaatctacctcatctgtttttgtggctgcagagcgtacttagtgttggtagagtgtcctggctgattccgtgtgcaggggccgtaggaaccactgggcggcgccattccctgggccatgtgcccccaacttccctgatgagcagaatcctctcaggcccytcttcataacgtaggtccctcagccccatccaggtccataggaatccaggtctccaggggagagcttggaaaactgcatgtctgacaagtgtcctgagaaggctgggaagtgctgtgtgtgctgggctcagagacttgcagcagaggcctggatttgaattcctgcgctgctgcttccttgctggtgactcggagcaagttacttctacttgccccagttcctttctctggagggaccgtggaggggagtggctaagacagagtctgggctctgacggcttgaagagctttaccagctccccctcccagcatctgtgtgttttctctgtgcctcagcgatctcatctgcaaaatggggggaacagcaggatcttcctagagggcagctgttagaattggctgaggtaacaagaaaaagcactgtggccgggcgcggaggctcatgcctgtaatcccagcactttgggaggccgtgacgggtggatcacctaaggtgaggagttcaagaccagcctggacaacatggcggaaccctgtctctactaaaaatacaaaaaaattagctgggcgtggtggtgggcgcctgtaatctcagctacccgggaagctgaggtaggagaattgctagaaccctgcgggtggaggttgcactgagccgagattgtgccactgcactccagcctgggcgacagagtgagactccgtctcaaaaaaaaaaaaaaaaaaaagaaagaaagaaagaaagaaagaaaagaaaaaaagaaaaagcactgtttgctgagcacttactatgtgccagatacgaggttaagcattgtcatagtcagtgctcaaacacttcatcacccatttccttttgcttatatatttttaaaaagccaaactttaatgcattattgattttgtttacattatgagagaatcataatcttgtggttaacaattcagagttacaggttgtataaaatataataccccttcttccaagcccagcttcctgtgaagccaatgttagcatggtggtattatcccttcatggtattttgtatgttctcacaactagagacaaatatgcacatctacagtgtctctgtgtttacaaagaaaaattgtatctgttatttacaacctgtttttaacctaacaatatagctgtacattcttctctgttgatataaacatcttttagagatattagctgatgcaattaaacaagagaaaccaattatagacatcagaatgggtaaagaagtaaaactattcctatttgcagatgatctgatattgtacctggagaaccccagaaaatcaataataaaacaaactccagcaataaatgaatccagcaaagtagaaggatatgaaattaacattaaaaatacaagacatctggccgagcacggtggctcatgcctgtaatcttagcactttgggaggctgagacaggtagatcacttgaggtcaggagtttgcgaccagcctggccaacatggcgaaaccccatctctaccaaaaatacaaaaaattagccgggcatggcggcaagcgcctgtaatcccacctacttgggaggctgaggtgggaggatcacttgagcctggtgagacagaggttacagtgagccaagatcacgccactgcactccagcctgggtgacagagyaagactccatctcaaaacaaaaacaaaaacaaaaaaccaatacatttttttagccctcacatggctgtttcagtagttagccatttccctctgacagatgtcaatattctatctttctttctttttgcttttataccatttcattgtacttgtatctgttctaccatctggttatttcatttctctctgcccacttcttagaagtggttttgccaggtcaaaggccctatacattaaaatttttatctgcttctgccacatcatttccaaaaccacagagcaattcatccgcctacctaaagggaagaaatctgctccaccagatgccatcaatctttccatttatttgctaatctgatgggcagaggtgggtaacttattgctttaatttgcatgttaccacaaccttgccaacatgcagttatcagcctttaaataattgccaatctgatggaaaaaaggacatctggctctatgtggcatatcactgactactgtgatgaaacatctctgggtgtgtgtggtttttttgttgttttgaaacagagtcttgctctgtcacccagactggagtgcagtagcgagacctcggctcactgcaatcttgacctcccaggctcaagcgatcctcccaactcagcctcccaagtagctgggactacaggcacgtgccactgagcctggttaatttttgtatttttttgtgtttcagtagccatttgcatttcctgtttatgagccggctgtttgtgtcctttattatctttttagaggaactcatttgagcttatcaaatcttgccatccatgctggaaggttgttattcacatacccatgttgcagataaggaaactgaggctcagagaggtgagatcacttgtcatagacatgcagctggtaggtggaaacttggtctgtctgtctgcaaaatcctgtgcataaagcacctgccacatcctagcactgattgcttccccaggaaaaattgggtttctccattaccatttcctccacacagatgctccagaggagtctgattagacgcagaggaactccccccatcactctgggagcagccctgggctggctataggaaggatgcatttctcaatatgagcagcaggtggcaatgtgggacggtgatttctcatcttaattgggaccagaggcatgtgggcaaagcagcccccgaacattgctgtggggtgcttgaagcattgcagcctcttttggcagaacctgctgaaacataaaataaaatgcacattcctttgatcctgtacttccacttctaggaatttatcctacataaatgcttgcacatgtctacagatacacaaacatattcattgtcacattgcttataattgcaaatgctagaaacaatttaaagtccatcagtaagggctgattaaataaattatgcattcatctaaaggccatctatgcatctaaaacagagtgggacatactggtagtgaatgaaatctactgttacaaaaaagagcaagctgcaggcagagggtatactatatcactatatatacatacattttatatatatatatatatgtttttgcttttgagacagagtcttgctctgttgcccaggttggagtgcagtggcacgatcttagctcactgcaacctctgcctcccaggttcaagcaattctcctgcctcagccccccgagtagctgggattacaggcacgtaccaccacccccggataatgtgtttgtacttttttagtagagctggggtttcatcacattggccaggctggttttgaactcctgacctcaagtgatctgcctgcttcagcctcccaaagtgctaggattaccggtgtgagccaccacacccggccatttttaaaaatgtgggagtatgtatagatttttgcctttgggaaggccgagaaggggtggagagaaaatcattttttacaagatgtggacttgaactcttagattctttatttttcttcttttttttctgtatgcatacattattcttccttcactttttaaagtataaatatattttaaaagaaagttaatcctttgagaacccttaggccattgagtctggtgtttctcatacagtagggagttgggggcaggggacagttaaacagaccccctagctaagcatagtgcttctgtctggaacatttattttactggattattttggggggctgtttatttgaacattgttttggggaaaaaggcattcttatatcaaagaatcacagagtctgatgcaaaactctgatgcatttcaaaggtaaaacacaagactttaaagacatgtgtcttctgggggcctctctgtactatgcccccaaatctagagggcctagagggctttcccagaaaaaacttgagaggtattcaagtctgggtcctcattttttggatgaggagactgaggtccagagatgggcaggggctcagccgaggctacatagcatggggactctgggatttaaaccagatacaccaatctggtttaaattggtgggctgccaatcaccgtgggcctggcagccctcattcatggcatccggttatcacaccaataagaaatacctcgtaataatggagagaatgtagcaagtagcattttacaaacttctaccgataccaagtgtgttctgtgtgtgatctttctgaatcctcctgaccatcctatgagctagatggccctcattttacacatgggggaaactgaggctcagagatgcaaagtgacttggccaaggtcatctcgttagaaagggaagagctgggatttcaatgctctctgtcttcaaactttgtgctctgtatttcgcaatttattattgtttcttaattaaagaagcaattcatgaacatgttctccttgggctaataatttgctaacattcagtaagatttgttatttaataatatagcgtttattaggactgtgtcagtcatctctgtgctttagatgttaataacgcatttgatctgtatataaccctctgtggtgggtamttttattatcccaatttacaggcaagaaaactgagatgctgagatgtgaggtgacttgttcaaggtcaggcactctgctacagcactgggcctcttaactgggctcctctgacttttgttaaaaaaaaatcaaatatttcaaaaaggaaaattctcttttgaccacattccctctaaatctatccccaggtaactattgctatctgtttgctgttatccttctagaacagtgctgtacatagacaaataatgggaatcacatttgtaatttaaaattttctattagacacactaaaaaagaaaaatagaagtgaaatcgattttaataatacattttatttaagccaatacatctaaaatattattagcattttagcattaaccaatgttaaaattattgataagatattttacattttgtttctcatgctgactctggaatccagtgtctcccctaccctatattaaatgtggctgcattcgagccagccgcatttcaaatgctccataactccctggggcttgcggctactctgtttcccagaacaacacttggcctttatgcagacattaaaatacagcatgaggctgcgcacagtggctcacacctgtaatccagcactttgggaggccaaggcaggagaatcacttttgttcaggagtttgaggccagcctgggcaatatagacagaccttgtctctacaaaatataataataataattagccagttgtggtggctcacacctgtagtctcaactactcaggaagctgaggtgggaggatcacttgagcccaggaggttgagggtgcagtgagccagactacgccattgcactccagcctgagtgacagagcaagaccttgtctcaaaagaaaaaaaacaacaaaatagcaaattgtactggaatcccaagtagacagcaagcctctgttttcccagtgggaagatttttaaaattttgtctttttttgatttttggggcaacctaaatattgaaataattaggaatggaagtaaatagttgcatttctccgtatctgttttgttgaacgtctgtagtgaattgtataaatgtgctgtaaccatttcgaacatttgctttcttcccacgaccacatttcaggagggggctttatgcagactccccctttaactacacagctttgctcatctgcagggccccakgttgagccaccaagctcagttttccagaatcttctcttcctcactcccatatgcactgaattccttgaatctctacagtatatgatgtttcactggaaattatttttggggggtttgccagattttctattattttattttaaaaattatttcgcgtggtttaaacattaaaaatgtaaagtagattacaaaccacatacccgatatggggttaacatccaaaatagataaggaactcatacaactcaataccaaaaattccaaataacatctgggagcggtggctcacacctgtaatcccaacactttgggaggccgagttgggcagatcacgaggtcaagagatcgagaccatcctggccaatatggtgagaccctgtctctactaaaaaatacaaaaattagctgggcgtggtggtgcacgcctgtagtctcagctactcrggaggctgaggcaggagaattgcttgaacccgggaggtggaagttgcagtgagccgagatcacgccactgcactccagcctggcgacagagcgagactctgcctcaaaaaacacaaaaatccaaataacctgactgcaaaatggacaaaggaccagaataggcatttttcccaaagaagacatacaaatggcaacaggtatgaaaaggtgttcaacatcactactcattggggaaatgcaaatcaaaatcacaaggagatatcaccacacacccgttagaaatgtcaaaagatgacaaatattggcaaggatgtggagaaaagagaactctttcgcactggtggtgggaatttaaattggtatagccatcatggagaacagtatggaggttcctaaaaaatcaaaaatagagctaccacatgatccagcaatccctcttctaggtatatattcaaaggaaatgaaatcactgtcttgaagagatgtctgcacctccaattcattgcagcattattcacaacagctgagacatggaaacaaactaagtgtccatcagtgcatgaacagatacagagatagtggtacaatggccccctcttaacctcaggggatatgttccaagacccccagtggatgtcaggaaccatgggtggtactgaaccctgtatatactgttttgtcttatacatacataactatgacagagtttaatttttttttttttttttgagacagagtttcgtttttgtctcccaggctggaatgcaatggtgcaatcttggctcaccacaacctccgccccccagattcaagcgattctcctgcctcagcctcctgagtagctgggattacaggcatgcaccaccacacccagctaattttgtatttttagtagagacagggtttctctgtgttggtcatactggactcgaactcccgacctcaggtgatccgcccacgtcggccttccaaagtgctgggattacaggcgtgagccaccatgcctggcctgataaagtttaatttataaatgaggcacagtaagagattaacaacataataaaatgaaaccaattataacgatatactgtaatgaaaacaaaataagggttacctgaacacaagtactaccataccatgacagttgamgtgataactgagacagtggctcccaagtgactaatgggcaggtgtggtctacagtgtggatacaccggacagagggatgattcaccccccaggcaagatggagcaggatggcacaagagttcatcatgctactcagaatggtgtgcgatttcaaacttagggagtttttcatttaatattcttggaccatggttgactatgggtgatggaaaccttggaaagtgaaactggataagacaggactgctgtgtatgtaaatccacgaaagaatgttattcagccataaaaagggagaaatcctgccatttgtaacaatatagatgaacttggaagacaatattgtaagtgaaataagccagacacagaaaatcaaataccgcattatgtcatttatacgtgggagctaaaaaagttgaattcagaggaacagtagaacagtggttaccagggctcaggaggtggggaaatgggggtgtgttggttgagggtataaactttgagttataaaatgaataagttctggagatttaatatacaagtatacaatgtattgtatacttgaaatttgctaagagagtggatcttaagtattctcaccatgcatgcacgtgtgagtgtgcacctatgtaaggtgatggatatgctaattagcttgattgcagcaatcatttcacaccatatttgtgtatcaaaacatcatgttgtacaacttaaataagaattttcctttgtcaattatacctcagcaaggctggaaaaaaattaagtaataacagtggtaagtctccttccttttcttgtcacatccccttccaccaattcccactgctcataattgattagttttattagtttcaaatggatccttctagagttccttcacacaagtgcaagtgaatgtgactatattcttatttttctttttttccacaaatgcatactaaacacgtggttgctggcactttgctttgtgctaacaatatatcacagcaatagataactcttgggtaaggtttagtgtgtcctctacactgctctaagggatatacaaatgtaaactgatttgatccatgatccaatcactgctatatatatattttttttgtttttgagacagagtcttgcttgctctgttgtccagcctggagtgcagtggtgcaatctccgctcactgcaacctctgcctcctgggttcaagcgattctcctgccccagcctcctgagtagctgggactacaggcgcccaccaccatgcttggctaatttttgtatttttatatttttgttagagatggggtttcaccatgttggccaggctggtctcgaactcctgacctcaggtgatctgcccgtctcggcctccccaagtgctgggattacaggagtgagccactgcacccagcccactgctatatttttatcctgtgttttttgccaggcaggacagagcaggatggcacaagatttcaacacactactcagaacagcatgtaatttaaaacttatgactgtttatgtccggaatttttcatttaatatttttggaccatggttgaccatgggtaactgaaaccttggaattcaaattcttttgtattttgagtatcactctgtcacccaggctggagtgcagtggctccatctcagctcactgcaacctccacctcccgggttcaagtgattctgctgcctcagcctcccaagtaactgggattacaggtgcctgccaccacccccagcttatccttttttgtatttttagtagagacggggtttcaccatgttggtcaggctggcttcaaactcctgaactcaagtgatctgcccaccttggcctcccaaagtgttgggattacatgcgtgagccactgcacccgcccagaatgcaaattctttgttatacaacactatctttgactcatttttgccaaatgaccttcatatgccttttaaaaaaattgtggtaaaataataaataacataaaatatactattttaaccattttaattgtataattcagtggcagtaaatacattcacaatgttgtataaccatgccgttatctatttccagaaacttttcatgattctaaacaaaagctttgtgcccattaaacaataattccccacctgcctttcctcccagcccgacatatcttctattctactttctgtctcttctattctactttctattctactttctgtcgaatagtatacttctattgtactttctgtctctgaatttcctgttctaggattctcattatatgagattttggagacagagtctctgtcgcccaggctggagtgcagtgtcgccatctcagctcactacaatctccgcctcccgggttcaagctattcttgtgcctcagcctcctgagtagctgggattacaggtacacaccaccatgcctggctaattttttttttttttttttgtattttagtagagacagggtttcaccatgttgcccatgctggttctctaactcctgagcccaggaaatctgcccaccttggcctcccaaggtgctaggattgcaggcgtgagccaccatgcctggcatatgcgtcagaatttcattcctttttaagagtgaatacattgtgtgtatatactgcattctatttatccattcacctatcaaccgacatttgggttgtttctgccttttggctactgtgaataatgctgctatgaacattggtgcacgagtatctgtttgagtctctggtttcagttctttgggctatatacctagaactagaattactggatcatatggtaattctttaactttctgaggaactgctaaactctttttcacagcaactgcagtattttacattcccaccagcaatgcataagggttccaatttctccacgtcctcaccatcacttrtttcctatgttttaaatagtagccatcctcatggttgtgaatggtatcacactgtggtttttacatgcattttctaatgactaatggtgttgagcattgtttcatgtgtttatcagccatttgtatctcttctttggagaaatatctattcaagtcctttgccaattttcaaatcaggttgtttgttttttattgttgttgagtcgtaggagttcttttatatattttgggtgttagacccttatcagatatattatttacaaatattttctcactttctgtcagctgtcttttcatactgcattaccttttttgcttaattattcattgattgtgcaaatatagagtgcctcctatgtactcagaactgctgtaggcacaggggaaaagtggagaatggtcctgccttgctttttaaagtcatctgtaaacgccgtgtttacagtgatattcaagattgcagttgtgtggtcagacttcaaagaatgccagttatttctaaagctgtgttaaatttctttgcctctttttttagccatcccatcagatgatgcttagaagtatccagagttggcatcaactgaggtggtttcaacactgcccgcgccctgcaggcctaaacctctggatgcccagttcccacgcacgtgattttgacatgatcaatctggggttggcacctgggcatccagagatttaagagctcccaggtaattcttcagagagcctgaaaagtggagaaacataggaagataatgtatttcagttgaacacttaagcttattgctttacattgaaatgtcacccgaaatggtgacattcatttcaatgtaaaacaatgagctcaagttgaagtctaaaagttaaacatattcagcgtattatttgaaaatgaagccaacatactttaaaaaaaaaacatagtctacattttcgaccctttcaaatgccctgtgaggtgcagccaggtttagaatcgctggtggggcgagtcttcctgaaacacggcttgtggttcagaagagtcagtgagggagtttccaatactttgaaacttcagagcaatccaaaatgactctcacttttccaaggggtgatttcggagaaaaccaaattttatattttatatttttgttttaaactttatatttgtgcatataaatagcattaccgtggagctttaaaacaatgtatattaaggctcatgtatggttcatgaaaatatttwaaaaaaaaaaaaagaagtagaaaagaaaacaatatctaaatagtgtcattcttcagtgcccggctttatccccttaccagtctgcccttgggaactctctgtgtctgtaggtaaaatgtactaactcactttcactgctgtatgtttccagaacataaacacaccattgtctgtttaatggtgatgcacgctagtgatctgtgggccaaagttgaccttcagagatgcttctgtggtctgcacagtgattaaaaactttttacttggatgctaaccttaaaaaacatcagaaggttatacataattgtctggattatcagcttcctttgaaagcacaggccttctggccatgctggggtgtttccctctcctgccgagggctggttggtgggctaagtgccatggcccctttctggcccgtctctcttttacttggcctgccttctctggagtgagttgagtttgagactccagcccaatctgccagttaggttgttgctgatgtctttctgtgattgctgctgtgctgagcctgctcacagtggcctcctcctcatgcacatgggctggcattgctctggggttggaccctggggagggagaatgctgctcagtgtttagtgttccttctcctgctctggaaagaactaccatttatttaatgcatgatatagttttgctgtgtccccacccaaatctcatcttgaactgtagctcccataattctcatgtgttgtgggagggacccagtgggagataactgaatcatgggggtggtttcccccatactgttctccttgtagtgaataagtctcatgagatctgatgattttgtaagtggtttctccttttgcttggctttcattttctcttgcttgccgccatgtaagatgtgcctttcaccttccactatgattatgaggcctccccagccacatggaactgtgagtccattaaacctattttttaaaaaataaataaataaataaattacccagtctcaagtatgtctttgtcagcagcatgaaaacagactaatacaatgcatatttattgagcacctgctacgggccgggtgatggggacatagaggtgattgaaatagatcaggctcccacctgcaggagacaagaccccttgcttctttttactgggggtaagacagataataagcaatttggtattgaaagggcttcctgctgtgggcctgtcctgcagcttctttcccacaggaactccccaccctcaatgagtgacattcagaagacccttggcctcatgggaggtcatgcctggccagccctgggtgtgggatggtgaatctgtaacccctactctctgtgctctgtccctgcaggggacaaggaccacatgtgcagtgtcaaaagtygcctgtggaagctgctrtccccagccaggctggccaggcgggcccaccggagcaaatggctrgagagttacctgctgcacctggaggagatgggtgtgtcagaggagatgcaggcacrggccctggtgctgcagctgtgggccacacaggtgggtgtgaatgtgcaagtgggtgtgtgcaggtgtgcatgtgtggttgcgatatgaacgcrtgtgtgtgtgcatgtctgtgcacctgtgcaggtgtgcacatgactatgcctgtgtgtgcatgtgtatgtaggtgtgcatttgtgagtgtgtgctgatgtgagtgtgggtgtgtgcacacatacccactgcccaaaccagttccctgacttcctttactgtcaaatagcatcacgaacagaaacattcattcggtattcttttctttttttttcttttgagacagagtctcgctctgttgcccaggctggagtgcagtggctcgatctcagctcactgcaacctccgcctcccaggttcaagtgattctcatgcctcagcctcccgagtagctgggaccacagttgcctgccaccatgcctggctaatttttgtatttttagtagaaatggggccaggctggtctcaaacttgacctcaagtgatctgcctgcctcggcctctggaagtgctgggattacagtgtgagccaccacgcccagcttctttttgttttttgttttttgtttttgtttttttttaatttggaaaaatgttaaatttatagaaaagtttaataaatagtttaatgaactcctatatatgcctcaccttgattccccagttttaaacattttaccacctttgctttctctctctctgtctctctctctcttatgctctcttttccccactgggattattttattgaaataatttgggaataagttgcagatatcatgcttttttatccctaattgcttgagtgtaagcaagaacatctcctgcatgaccacagtacaataaccaatttcaggataatgagcccaaatacatgatcattatctaataaacaatctgtattccagttttgccagttgtctcaataatgtcctttttggttcatcttggtccagcatccaatccagaatcacacgttgcatttagtcattctgactcttctgttttcttttcttttaatttttttatttttttgagatggagtcttgctctgtcgccaggctggagtgcagtggcataatctcggctcacggcaacctctgcctgctgagttcaagcgattctcctgcctcagcctcctgaatagctgggactacaggcgcatgccaccacgtccagctaattttttgtatttttagtacagatgggagttcaccatgttggccaggatggttttgatcttttaacctcgtgatccaccagcctcagcctcccaaggtgctgagattacaggcatgagccactgcacccgacccattttctttaatctggcacggtttctgtgcgtttcattgtttctcattacatttacattttttgaagtgtgcagaccagttattttgaagaattgtttagaagttccattgagacactgggcatggtagtgtgcacctgtagtcccagctagtcaggagggtgaggcaagaggattgcttgagcccaggagtttgagaccagcctgggcaacatagtgagattccacctcttaaaaaaaatcctttgagtacttaccgtagacctcaaagattctgtgttgtgtcgattaccatttggggggtcaggrggacagggggcagagagtcaaggaaacatatacaaggtgattttagatgatgatatgtagagtatgaaacagggctgtgaatagagagactttcgggtctgctctagctggggtggtcagggaggcctccctgagatatttgagatgagccctggatgataagaaagctagattcagagacttggagaagatatggggatagaagattccaaataagggaaacagcaagtgcaaaggccctggggttggatcttgcagagtagagttggatcacacagctgaagcagagtgagggagggggcgtgagaccgagggaagaggtcactgagggccttgtgggtcctcataaatgaggacttgggatttttctctgggcgagatgggggcctgggagagttctgagcagaggagggacaggatcttgggggcaaaagcaaaaacagggcaacaaggaggaaactgtggtggcagggtcaggtggtggccatggaggtgatgaggacgtggatagattttggaaatttcaggaagacagagtcagtggacttggtcatggaccagatattggagtgagagaaagatggtagccttccatgctgcacagctccaggcctggttcctgccctctctcctgatccccaagccccatctttctcttggccccacttcgacggtgacagttgcacaagctgacatttctgggtaattcctctcccatcgacttgcagcttatttttagtttcctcagagccattaactgtccttgcaggcagagactggcaaggggtggggactgggatcaattggcagttgtcccccacatcagtgcctaataacatatttatgtgcagagatgacttggagctccaaagtgtctccagaactctcgtgggaatgactggtgtcagcaaaactggatgctggctgaggggtttgagtggcagaaagtccagggaacagcctttggcagggccaggagagctgggcaggagctggggacaagatgtcctctgaggttgagtcgttgacagcgtccagaattcaggcaggtgggaaaacttttcaagggccttttgggagyggagccaagagggtacttggcctaggagtttctggcacaggctctgtgacctcccagcctgagtttgaatcctgattttgacacttcctggcaagtcagtcacttaacctctgagcacctcggtttactcatctgtaaaatggagatggtagcacccgtttcaagacgtggttgtgaagatgaaaggaggcaggaatacatgtgcaattttgtaactgtgccttgcagataacaagtgctcaagaaacatcttcaacaaatatttagagcacctaccatgggccaggccccattctagaagctggggatagagcggtgagcaaaacagacaaaaatccctgcccttagggagctggcattctggtgggagaagatagacaattaataaacacataagctgtcatcacagtgctttgggaagttagagaggaacatcatttgagtcctagagttcaagaccagcctgggcaacatagcaagaccccatctctgcaaaaactaccttattttttttgtagaaaagctgggcgtgatggtgcgcacctgtagtcccagctacttgggaggctgaggcaagagcattgcttgagcctaggaggtcaaggctgcaatgagccatgattgtgccactgcactccagcttgggtgacatagtgagaccctgtctcaaaaataaataaataaataaacaaacaagtaagcatctaaaatgtattagaagtcaggcgcagtggctcacgcctgtaatcccagcactttgagaggccaaggcaggcagataacttgagatcaggagtttgagaccagcctggccaacatgatgaaaccctgactctactaaaaatacaaaaattagccaggcatggtcgcacaggcccgtaatcccagctactcaggaggctgagacatgagaatcacttgaacccgggaggtggaggttgcagtgagccgagatggcaccactgcactccagcctgggcaacagagtgagactcccatctcaaaaaaaaaaaaaagtattagagggaatgtgttctatggagaagagatgcagcaggaaggcaggcccaggaaggcctcactgaaaggtgacatctgagcagagactgaaggaagtgaggggtgaaccatgtaaatatatagaatgaagtttcccaggcagggarcagcaagtgcaaaggccctgaggcaggactaagggtgacacrgtggggaggcagagctgccggaccacacaggtccctgtaggccatggggagggctttggcttttactgtgagtgagacaggtgcctgctgtagggctctgagcagaggaagaacctggcctgtctttcgctttagagggatcattctggctgcagcgctgacaagagactgtagggggtggggaagcagaggcagggagagcagagaggagcagcaggatccagacaagagagggtgctgctgggccagggtcaggggtggttagattctgaacatatatcaaagtaaagccaacaggatccgctgttggatgggaccttgggggaggccatcaaggatgaatccaggtttgggcctgagtgacaggagggatggcagagccatgggcagaagagggagatggcgggaggaggaagtttcagggagaagatcgggggttgggctttgggtatgttgaatttgagatggagatgggggagtggacacctggagaagagagtctggagttcaagtttgaggtccaggcttgggagttgtcagcatagaggagtttaaatcctcaggactggaggagatactgcaggcgagggtgggtgaagaagggggcatccctggggctctccagtggtgggaagggtgaggaggaggggccaggaaggtgggaggagagccgggagtgggaagctgggtcagatgctgcagagaggctgaaaaatggtagctgtgattgctgctgtcaggtcggagatgatgagtcaggaataataatctcaaaagatactgagcacttaccctgggccaagcatcctgttgagcactttgcaaccaccatctcataggatcctcacaacagcttcctgaatccagaacccctgaacctggaatcgagagtgatggaaggagcagtgggagtctcaggcatccagggaggactctgtgggccgagacctaaggtccaggcaaggggaagaggaggctgtaagggaaggtggggtggggtggtggggggcagacggaggagagtttccaaacacaggtcaggcttccctgccagctctgagcccactgatgctggtaatgccaggactgaaaccattgattgacatgatgtccctcagccccatccatcacatctgatccttctcttccttcccgatatctggcttggccttcaccccatcacatcctcagcagccacagccacacatccctggaaattcctgggtggtcctgagaggtaggggagggggccacgggagctgctgggcctgcacatagctccgctgagatagtgatcatcgagaagaatccttgaggcatctgacaacggagtagaaagcaaaaccacagtattgagagtcagacagactcgggtggaatctcacctctgccactaaactagttatgtgacctcaaacaagtcacttttctgggcttaagtttcaccatctgtaaagagggttggtttttttgtttgtttttttttttgtcttcagtagttttatcttgaaataattttagattataaaagagttgcaaagatagtacaggagttcccaaatacccttcacccagctttccctaatgttacataaccacaatacattcatcaagactaagaaattcacattgggacattgctagtaactaaagtctatactttattcacattgccccagtttttctactaatattctttttctcttccaggagccaatccacaatcccacattgcacttagggcttttgtttgtttgttttaaatagactctatttttacagcagatttaggttcacaacaaaattgaaggaaaggtgcagggatctcccttagcccccttctcccaatgcctcgcctctccatcgctggtgtccctcagcagagtggcacatttgttacaatttatgacctacactaacacatcatcacactcgggatattcttttattccgttggaatcttctaaatcataaaaattaaaagaaacacaatctgtgacccccatccctcaggtctcccttcttctgccaggctacatcctcagagggtctccccctgggggatractacaatggcctccagtagctctaggcaatttagcaatcccatggaggagggcttcccttcccctaaattctagcacagctcccaagactgatactcactggcccagcccacgtcatatgccccactctgcgtggatcactcagtgcctccgcctgggtcccatgcccacacttgaagtctggaaggatgggtcagtcctggatggcccacatggacttagacttaagaggaggtggttctttgaaggaaagtggggtgctgttaccaacgacaaggaagcggatgcaggcaggagcgggcagcggaagtcccccacttccactgatgggccatgttgtcaggaggcaacaagaaggagcatgtgaatcaccaagggtgtggtctggcccgcagtcagtgcctcccagaggtcagccactgccattcacaggaaagctagaacaggggtggcactgcttttgggtcatggcctttggctgcagtaggagggaatgaagacaaacaagaagtgtcttcctgagtaaacggaggcaaggctccgtgggtgaaagctcaaattccagggtggcaaattcaggatctcttatggttgtgtgtgcacacacacacacacacacacacactcacactcacatctgtgcagttgggtaaaaggcggtcttggtcacctccctaacttgccacagctttttcctgcaggcagagatagccaagcgcccatgtgttccactcctgcttggtaattaatgagcggtggcccccatctaaccatctgggccagataaaatggccttggcgctgagctaagctggtgttgaattatttatcatccgcatttgcctggctatttaagtgatggacagcaggtgaccttgctgtgtcagctggacctgaggtgctggtggaactctcagaaagggccggaggcccccccgacttgttttcaaatccaggggaggggccagtgggggaggagtaaccacttctgagcacctactatgggcgcagcacgtgtgggattgcttgcattcagcctcactggacccttgcgtccacccaggaggtggcaatgttacccccagtgttgagacccaaagggggacgtgacttgtccacagtcacagaaagtggggagctgggatttgaacccacctctacctggtctcagtccagggatcttctagcccacctcccaggctgtcttggagctccacctctaatccaaagggatgcagatgtttatttgacaaatatcagtgagcctccactatatgctgggcagtgggtagtgaccggggagtacttcgttttccttttcagtaaaaggcctaataatggcacctgcgtgatggaagtattgagcagaggagtgtggttcctcctggcctcacgggcactaaagaggaaggcaaaatctatctcaccatcactaatgctatggtgcatttctttccagcctttccccataggtttttcttctgtggttaagatcatgcagctgttttaatctaaccttctatttggtttaatattgtaacatgagcatctctcatgacattgtacatcactgtagaaatgatttggatacagcctgggaaacatagtgagacctcatctttacaaaaaatagaaagattagccgggcatggtggtgcatgcttgtatcagctacttgggaggctgaagtaggaggatcacttgagcccaggaggtggaggttgcagtgagccacgatcgtgccattgcactccagcctgggtggcttctgtttcacttaaaattagtgtgtccattaaaaaattttgaacagtttaaaaggtatttgcaaggaaagtcagcctccttcctccttatcctcttgtcttcccagcttctgtcccaaggtaacctcagttacccgtttctggtgtctcttagagatggtctgtgcttctttgggaggctgtggcaggaggactgctcgaggccaggagtttgagatcagcctgggaaacatagggagacctccatctctaccaaaaaaaaaaaaaaaacctagctgggtagcacatgcctgtggccccagctccttgggaggctaaggcagaaggatcacttgagcctaggaggtcgaggctgcagtgagctatgattgtgccactgcattccaccctgggtgacagagcaagaccctgtctcaaaaaaaaaaagagatggtctgtacttcttcatgtatatttctctttaaacaaacacacaaatggcagcatgctgagccaccaccctgcaccttgcgtttgcatgcttctgtgtgtcttggctacagtcccacatcggtacacacagagccagcttctttttaatgacttcctgcatcacatcatccaatggatggatcttcattgatctcattgatctcttattgatagacatgagattgtttccagcatttttctattacatgagcactgcaataattatctttgtgcatatgtccttttgcccatgtgtaattatgtctgtaatgaaattagtgggtaaacatgatatttaatgatgatttaatattccattattatgattgaatagaatagtcacggcagacaaaaaccttcccccaaattgagattagttggtattcttcccatatctggatcactaaagggtgccatatacacattttagccacataccaaagagctgaggctaaaatgtgtatgaaaatgttcagctaagactgaagccttgaagcaagaaattccactcgttttcctaagtgtttatctattgggaagtttaaataatttttattcatagctttcagtcatcaatgatgattgcggctttgttttatacgtacacaacacacacacatttattcttcaagtgactgatagaatttgaagatacaaagcatatagggaactttttgcttcccaaactacatcaagaatgattatatttggaagcaaatctttagatatcrcaccagttagctattgttgcataacaaacatccataacaactcatcagcggcatacacccatcagcatttatttaactcacgggtctgtgggtctggctcattggggcagctcagctctgtccatgagtctctcatcctcctcttgggatcagtgggcttgccgagcaagtggaaacacaaagtctctcgcggcttaggcgtagagtggctgttccttcaattccacctcaatctattggccaaagcaagtccacggctgagcataaattcaaagggcaggggaaatacgctctggctcttgaataggaggaacagcaaattcacatggtaaggagcgtggattctgsgattggggaagaattggggccaacaatgtgatcattctcagatgtgaacagtcttaactgatataccctgttcctattactgacactgttttgctgattagctatgaagattacctgtgtgacctaggattagtgactttgcacacagtcagggatgccacgagtggccttgaagtaggtattttgggccacagggcagttttggccatgtcctgaggctggagatagacactggtcatgcctgggtgtttggcagcagtgggarcccaggcctactggcccctctgtcttggcccgagctgtgtccctggcagagacragtcagctctgccctcataatggcataacaggggcccttctccttgcaggggaatatgggtcccgctgccttctggctcctgctcttccttctcaagaatcctgaagccctggctgctgtccgcggagagctcgagagtatcctttggcaagcggagcagcctgtctcgcagacgaccactctcccacagaaggttctagacagcacacctgtgcttggtgagatcgtcagaccctccaagatagcccctaagactgcgtcatcatggacccccaaagccctccccaacatggactcctgtcttccagggtccatcagtgtgtcctccgacctagggtctccctaagcctcctrtcttcacacacctggcatctccatactccagcctcagctaggggtcaagtgacagaaaacctaacttcaattgactaaggtgaaaaggtactttgagacatgtcactaaaaagcccagaggattggcttcaggcacaggtggatccatgcactttaacaatgtcgtcaggactactcagttcctctccacctctcagccctgtttcccactgggttggctccagtctcaggctggcagtagctgttggcagctcaaggctgacttcctcctggctctgtgagactctgaatctcttacartgttcccaccaagagtcccaagactgtgtctcattggctttctttgggtcatgtgtccatcctgaaccaatcacagggctcagagggatgctctgattggccagtcacagccccatcccaggagttgagcatagaagcagcagtctaacccctgagaatgagagaggggtggaccctagaggaaaatcaggggcccgtttccagaagagaaatatatgccgggcagacaggaacagagattgatggccctactctctccccagccttctgatatctccctagctcccaccttccctcacaacttctcttggggtcagacctggataccctcatgttcaaasgtctctgagggaccacagagaccacatgtcatcgtgtgtcctttttcaccttgctatgtgactgtgtgggcgaggcaggcaccctctctgagcctcttcatcttcctctgtaaaataagagctggggttggcatatgagcaggtgaagggatagcccgctgactcttccttgcacctgccccatgcagatagcgtgctgagtgagagcctcaggcttacagctgcccccttcatcacccgcgaggttgtggtggacctggccatgcccatggcagacgggmgagaattcaacctgcgacgtggtgaccgcctcctcctcttccccttcctgagcccccagagagacccagaaatctacacagacccagaggtaaatggcaggggcgcctggtcatatggggtctgtgggagaacaatcagtgactttgggatgagccagatctgagtggcagcctggctctgctctttgtttgctatgtgacattgcccagattgcttcacctctctgtgtttgcttcctcacctgtgaaatggacctcataatagcacctgcctcatgagattgataggaagattaaatgggatcatgcataagcagatattgatggccccactctctccccagccttctgatatctctttggctcctaccttttttcacagcttctcttggagtcagacccagatcccctcatgttcaagggtctctgaggaaccctagaacatgaggggatgttcattcacactgagtgctttgtgatagctcagccattttccttatttcagattgttataatgtcagtttctcaacacttttsccttgccccagactttgagaagaagtaaactttcacaattgctaacagattgggtgtttactgtgtgtcagaccctaaactacatgctcatctatccatccattcattcatctgcccatctactcatgcatctgtctattcatgtattcatccatccatccacacactcacctatctacctatccattcatctatccatccgcccatccattcatccatccacccaccaatttaccctttcatccacccatctacccattcatttatccatccagccacccatccactcatctatccatccatccactcatctacccatgcatccatctgtccattcatccattcacaaattcacccatccatccattaatctatccatccacccatgcatccatgcatccatccatccatccacatactcacccatctacccatccattaatctatccatccacccatccatccatccatccacccatgaagctactctttcatccacccacctacccatgaatccatccatctatccatccgtctgtccattcaatcatctactcatttatccatccatccacccactcatttatctacccactcactcatatgtccatccacccattcttctacttatccacccatccatccatctatccacccatctactcatccatccatccatttgtccattcatccatttattcatccatccacccatcaatctacccattcattcacccatctacccatccatccatccaccccatctacccatccatccatctatccatccctccattcatccatctttccatccacatttccatctcttagtctatccactggttcattcacctatccttccacccatctttcagtcggcagctactccatgccaagctctgtgctcagctacaacccttgccttaccactgtgcagtgtaaccaaaggaaattggcattttctttttaaaaaatattttaatttcttttattttacattacaaaagtaatatatatcatagaatataargaaatacagagaaatatatrcttaaatgtaaaaaatatgtatttcccttcttctccagttctacagagttctctgaccaaggtttggagtgtgccttgcgaattgttttcatggctttacaggcatacacacaacacattcacatgccatgaaaagattggtgtgtgtataggatcatgcaatatatactattctgaaacttgcttttttcactcaacaaccaattgtagaaattctttccatgtcagtacacacaaaccttttgccataattttttaaccaatcccctatcaattgacctgtatatggtttccagtttttccctcttataaacatgactgtcatgaacatcctcatacatttttcttggtgtgagcttgttctgggaatggggtcagaaaaggaccttcttcctatttcaggtatttaaatacaaccgattcctgaaccctgayggatcagagaagaaagacttttacaaggatgggaaacggctgaagaattacaacatgccctggggggcggggcacaatcactgcctggggaggagttatgcggtcaacagcatcaaacagtgagtggggggccagggcagggccagggtggctcctgatcccctggttggcaggcgcccttctctcctgggactgagggctcagccaggagaatggtttggcagaggcttcacatggacagcccgtgagccatctcttatttgtggttttacaactgtgtgcttttataaatcagaagagctcgtgtaaaaaagccagatttcggatttcttttgaaataatcagatctggcagcaggttcttccctccaagactggtgtccagattccaaatactggacattcctttcagctgaccgtagctacccgtctgcagctgctgccgcatgttcagaacttcatgttaggaactggccgaacttcactgttcccacttggttattttaatrcctgtggggccgagagcctcataaattatctcccttgaaccccaggagctttggccaccaggatcacaaacagattggaccaggggttatgacatctgccctgtcctcctgtccagcccctgtgcaatcataagctgggttaccttctgagcctgtttcctcaactgtaaaatgagggttctgattataactayaccccaggagtgtcaggataaatgaattggatctttctaagttcttaacccactgtctggctcattgtaggcatttgaaaaatgttaattattaccataattrttaatatcattattgtgcatgcattgtgctaagtgagtgggcacgttacataaacctttagcctcagtttcctcaagaaaatggagtcaattatgaacataatacagctcatatgcattccttaaaatcaccttgctgtgtgaaatcatgcaacaaaaactgcagggattcacgcctgtaatcccagcactttgggaggccgaggtgggcagatcatttgaggccaggagttggagaccagcctagccaacatggtgaaaccccgtctctactaaaaatacaaaaattggccgggtgtggtggagcgtgcctgtaatcccaactactcaggaggctgaggcaggagaatctcttgaacccaggaggtggagattgcagtgagccaagattgcgccgttgcactccagcctgggcracagagtgagactctgtctccagaaaaaaaaaaaaaaaaaaraaagaaagaaagaaagaaaaaactgcagggattgagggaaaagggggactggggccaacactcaaaaacctcatcagtgacataataaaaaaaaaagagagagagagaagaacccagtaaaaaaaatggtagtaaagttttatacatgttacctggctaagaactatgtaagtgctgtaataactgtggctgtagatcgatgcttagttgtgtgcatgtgtatattttatggatttctgcacacccaggttcagctgggtgcagtctttcgtcttcacctcatgtttctcacaagtgaaattgcacgtgagcaaatgtgaaacttgcattatattcaaatggtgccctaatatatcaatcctattggaacaaattcacctgttcaaaacaagtgttagagcagaaccgactggcattcctacctcatcaagtttttggacagataaaaagagatagcgggtactaaatgcttagatggtgcctagcgcacagtgttccaataaattagctaatttgttgttatttttatctcactgaattgtcatgacaaccctgctggtccatctaaaaccgagtctaggcaggtcagatcatttgccgtgttcccaggaagtggaggtgcaggagttcaaatccaggggtgggcacaaaaccgccatcccttagaaactcaccctctagtttcctacagcctcagagctggaagagactcaacatgcctttcccctctttgaccagatgggagaactgagacccagagtgggtaagaacttggcgagggccacattcccataagcggcacagcccagatctgtccagagtgttaactcccctctctcctcatctgccctcttcttcactccttcagtgagacaaaagaatccccaccatgtgctcagtgctgcatcgggcgcctgggttggggtagggaatagtggtgggaaaagagtcataagatattctcctgacccttacgaacatgggcattggtaagatgaggcagggaggcagcaaccgttgacatcccccgtagggctgcctccacatttatgggggcactgattacatcataggcatggcagctgcgaatagttattatgacagttttcccagaagatggcagtagagagtgcttgttcttgcaaagttggtctatttaggacaattttctcagagatggcagtaaaatgtcttgagagcgatgcctgtttctaatctcacaaagacacctaagggttagcagcagtcctggccaagatagacagtgagggttccaggagtgtggggaaaggcggcaaagtgtgtgggctggaggatccagaggagtcgccgtattaatcagcacaggctcagctctgcacctgccgagtctcagtggcttttaccaacagaggtgtagttccactyacacggtatcagctgtgggattggagggcttccccactctgtgcacagactcgggccaggctctttccctctttcggctccaccgtctcaatgtgaagcctgcatggctgccaggcaggagggacagctggagagccacacactggctcgcgaatgctttgacacaggagtgacacaggccacttctgcacacagcccattcaccagaactcatccacgggcctgcctaaccttacagggggctggcaaatgtggtgagcagcaaatgcgtttcttctacttcctcactcctctcctcactttactcaaagttggagtcagacttaggaggcagccatggctcccctgccttgttcccgataaccccctgccctactcctctccttcacaccttccatgccatctctctgcagatttgtgttccttgtgctggtgcacttggacttggagctgatcaacgcagatgtggagatccctgagtttgacctcagcaggtacggcttcggtctgatgcagccggaacacgacgtgcccgtccgctaccgcatccgcycatgacacagggagcagatggatccacgtgctcgcctctgcccagcctgccccagcctgccccagcctcccagctttctgtgtgcacagttggcccgggtgcaggtgctagcattaccacytccctgcttttctcccagaaggctgggtccaggggagkgaaaagctaagagggtgaacaaagaaaagacattgaaagctctatggattatccactgcaaagttttctttccaaaatcaggctttgtctgytcccaattcacctcgttactctcacctcgtgatatccacaaatgctattcagayaaggcagaactaggagtcttcactgctctgcccccaactcccggaggtgtcaccttcctagttcttatgagctagcatggcccgggccttatccagtcaaagcggatgctggccacakaaagrccactcaggatgtcctttgtgtccattgatgtcattcagcagtcagtcccccaataatccttaaactagctaaaaccaaaggagtcccttagaagatctgcttccctggggccccatttgccagattgccccattgctcacactacttgagaaaatgcaggagagcttcccccaaggctgatgcattcccggtgcagaacaggggcaccctccaaacactgggctctgaggagtggagttctctgttctagagtgacaggcaccagatgggatgggctttctcagtgtcagcactcaggtagggagctaaggaagacacagcccagacaagatggctggaaggagccagccaggactccttagactgatmaagccaaaaaagaaggtgccgatttcatgcattctagtgcagaagccccaactgtgatcacgatccagtctgcagacgtgttttgtttggacttcacttaaaaaaatgccttagttgttatcatctttgggagagttcattcaaaatgtccagcttctcttgaaaacttggtatatctggccacactgggctcacattcccaagggtaactcttggccagagctgagtggcagccgcctcccttatgcaggacatgtgctctcggcttcaccagggttctgaccgggtctgcttctgcattcacagygcctcctggacctgaaggcatctgagtgtgagaccctgttctaactcttagaagtgacattgtaagaggtggtggggaccagctaattggtccaacccagcctgagtgcaccaccctttgaacaaatgtatcagtgatgaaaatttgcctttgccccggcttgcctgtaatcccagcactttgggaggccgaggtgggcggatcacttgaggtcgggagttcaagaccagcctggccaacatggcgaaaycccgtctctactaaamatamaaaaattagtcaggtgtggcrgtgcgtgcctgtaatcccagctattcaggaggctgaggcaccagaattgcttgaacccaggaggtggaggttgcagtgaactgagactgcgccacggcactccagcctgggcgacagagcaagactctgtctcaataaataaataattaattaaaataaaaaacagcttaaagagaaaaatggcctgcaaaccttttttatgatgctatttktattaatataaagtcytgtttattgagaccctttaaatgcctgcgagagaccctacagacagtatgtctactcctcacagcatctctatgargagaaggagggttgtgcccacttcatagatgagaaaactgagaggtgaggtgacttgcctggggccacatagctcataagctgtagaactctgcaggcagatttactgtcccaggagcaaatgctggatgagcaactcctgttctttgggctcaaggggactggtgatgggacaattcttctcgacttcaggagctgacagagccagaggcacctaaacttgggtacatcttgtaagacacataatgaggtccctctagctttagctggagggagataaaagaaccccagacctctgaatgtcccagaggctagtctcttctcagagcagcactggggtttgggggcttccctgggcctcagcctccaggcacccccaggattcccagagagacgctgtgattggcaggaggcaggatatccccagggaaacccatcttcacgcctgggtgacccccactgccgcctccttcttaactctgcaggaaatcagagctggcagcctccagtgggaggacagagccggtttccgtggcaaccctcagctgcctcatcgtggctgggaagggaaggaagcaagccggcagaaatagctatggaaggtcttgcgcaggctgcaaccytggtgtgctgggcgaaaacccttatgactccccccttccaaatcaggctgggttgtcactgagactagattctcacctgccttcaaagaagggccaattccctttaaaggtcgcacctccttggaaccacagtcattagtgaattacactcaaggaaaagaygtgctcccaccaggcagctccagctgttacctgagatactgaagtgcagctcaggagacgattatttaaacctgcccttgttttaatcgttatttttctctttaaaaaaaatagaagctataaagaaaagagggagagatgagtgggttagctacctgctatgcgctagttaggaagttacctggatgccattgtatttcttcatcccttgcttaagaatcaaaattactggacatatgttaggaatactctttctttctttctttctttttaagctcagtggcaagaatgaaatactctttttttttttttttttttgagatggagtctcgctctgctgcccaggctagagtgcagtggcgtgatctcggcycactgcaagctctgcctcccgtgttcacaccattctcctgcctcagcctcctgagtagctgggactacaggcacccgccaccacacccggctaatttttggatttttagtagagatgggatttcaccgtaytagccaggatggtcttgatctcctgagctcgtgatctgcccgcctcggcctcccaaagtgctgggattacaggtgtragccaccgcgcccagccaagaataaamtactcttaagttgatctaatgaagtgtttccttaccattgtgattattgttactattatttgctatattttaatattgttgtttaccaaatattytcctttaaacagactcgctttttaaacttttttttttttttttgagacggagtttcacgcttattgcccaggctggagtrcaatggcacgatctcagctcaccacaacctccacctcctgggtttaagcaatgcttctgcctcagcttcccaagtagctgagattacaggcgcacaccaccacgcccaactgatttttgtwtttttagtagagacggggtttccccatgttggtcaggctggtctcgaactcctgacctcgtgatttgcctgcctkggcctcccaaagtgctaggattacaggcatgarccaccatgcccrgcctaaactttgtttttaaaatgaactttttttccccccaattgctgccaatagtggataacatgtatcactcactgccaaaaatagaaagtgaccatgaaaaataaattygctggggaagggggctccatgctggtgtggccaaggctgagagctctctcttctctgttacaaaaygagataagcaagtgttagaattgccttaaggccacactggcatctccctgaccttctccagggacagaagcaggagtaagtttctcatcccatgggcgaccagggccatctcctcccaccagtggcccccactcacagggagctggcaatgccctacctgcctgttctccagatggagaaacaggctctgagatttcacaggtcttgcccaaagtcattgattttgatgattaraaagaataaacacagtgtttcctgagtagcagtgattgttatgccttgctattttaataaagattctattttcgtataacattgtcaagtggaaacatgctgaaatctattaaaccatctttgtttgtggaactgcctctgagtgtgattctgatggagggcattggccgtgcctggaatggtgaggtcagctcttgggacaggagagcacagagcatctactctgtcccttgctgtgggcccaggcctctcacagacagaactgagtcacacctttacccaccctccaaggcatagatgagtatccccgtttttacagagaaagaaactgagggtcagagaggtgaagtggtttgcccaagaacgtgtggctaagaggtaatagacctggaattcaaatgcaggaccctctgctgcctgagacagtgttcaggatctttctttcagtgatcctccggctggcagcagagggactgggtacccattagagcaggggtccacaacccctgggccacggatcagtataggtccttggcctattaagaaatgggctgcacaacaggaggtgaatggcgagtgagtgagcaaagcttcatctacatttacagccactccccatcactcacattactgcctgagctccacctcctgtcagatcagtggcaccattagattctcataggagggcgaaccctattgtgaactgcacaggcgaggaatctaggtttcgcactccttatgagaatctaatgcctggtcatctatcactgtctcccatcacccccagatgggaccatctagctgaaggaaaacaagctcagggctcccactgattctacattatggtgagttgtataattatctcactatttcaaacaatgtaataataatataaataaagtgcacaataaacgtaatgcacttgaaccatcctgaaaccatacctcccacccccacccctgggtcgctggaagaattgtcttctatgaaatcagtccctggtgccaaaaaggttggggactgccgcattagaggactttggggtagaccctggtaacaagcagacaacacaaaagctctctttaaaattcaccggatgctgtccatccttcaccagaatgcatgcattcatgttaaaataaaaaagaaggggtgaaatggattaaataagccttgggagaaataaaaagagaaatttggttttttctctcaaatctttgtatagaaataatatcccagggcagatgtgcctcacgtcagtttcctcatctgtgaggaggtcatggaggcacatcaggtgggatgggatttggcagtgagtgacagacttctcaaagtaacatagcaacatgttatatattaacatgctttcattcaataccacaggtttttttttttttttttttttgagatggagtcttgctctgtctcccaggctggagtgcagtggtgagatctcagctcactgcaacctccgcctcccggattcaagggattctcctacctcagcctcctgagtagctgggattatgggcatgtgccactacacccagctaatttttgtatttttagtagagacggggtttcaccatgttggccaggctggtcttgaattcctgacctcaggtgatctgcccacctcggcctcccaaagtgctgggattacaggcatgagccaccatgcatggccacattttttttttctctttcaagcagatacgggaggccagaggtggtgtgacatctccacaatcatgaggttccctcctttctggaccctctagcatctgtaaccagtggtttccacctcaggggccgttatggctgcttaagctccagccattttgtccacattccacccagcaggaaagagggtgaagcaaagaagagaaaaacccctgcattcatcccattggtcagaactcaatcacatgaccacagcttgctggacagacaggaggctgggaaatgtagtctttctcttcaggacatcagtatgtgccctcagaggggtaccataccccagtttgagaagtgctgcgttatgctctcttgtttaccagtcatggtctgaaccacatggcagggccagagggacagggcttggcttccctgagccgctgacctagcctttgttataacccaggtcctagtgatctgcagctccaagactttggcctttcatacccttgtaccattaaagtcaacagaaagacccagtgttttattttgccaggtaaggacattaagaaatacatttactcctactgtcagcttatgaaaggatattttaatacccctaaagcagaaaggtaggttttatattggaattaacacaaccactcactcaaaagtctatattgaatagcccaaaaggtggaaacaatccagatgtccaccaactgataaatggataagcaaaatgtgatgtatcccccattccaatggaataatatttgtcaataaaaaggaatcaagtactgacatatgctacaacacaaatgagccttgaaaatattatgctaagagaaaaaagccagtcacaaaaggccacttattataggactgaatgtacatgaaatgtccagaataggcaaatctatagagacatgaagttggctagtggtttccagggatggggaaatagggagaagtagggagtgaccactaatgaaacctactaaaatggatcactgtgatggttgtgaaattctgtgaatgtactagtaaatgggcaatttttttttttttttttgagacaggggtcacactttgtcacccaggctggagtgcagtggtgtgatttcagctcactgcaacctctgcctctcaggctctagctatcctcccacctcagcctcctgagtagctgggactacaggcctgagccaccatgcctgcctggctaatttttgtttttgtatattttgatagaggggggttttgccatgttgcccaggctggtctcaaactcctgggctcaaatgatcctccctcctcagcctcgcaaagtgctaagattataggtgtgagctgctgttcctggtcatgtgggcaaattttatgatatatgaattatacctcaagaaagctgttatgcactttttaagtaaatattttgagcacctctcattgtaccaggcactgttctagacaacaggacccggcagtgagtaacacagaccaaaaaaatgatatatccctgtcttcacggcgctgacattctcatgggagaaactgtaagaaatgaggcaaataagtaaaatataaagcagttcaaatggagataagtgctttggagaagaataaaggagtcaggagatgggaagtgagatttgaaagagagtgagcaggaatggcctccctgggggagctttgaacagaaactcgatggaaatgagaggagcaaaccactggggcatctgaggaaagaatgttctggagagatgcaatggcaaatgtgaagatgggaagctctggggcaggttctaggagcaggagggaggcagtgtggccagcagccacggaaggctctgggcagagaagggccatggtttaacttgtattctaggaggatccatctcaccgtgcatgctgagggctgggaagctggagaccagggaggaagggactgcactagtccgggcaaggtctctgccctcatagatttcacatttgggcagcagaggccatccagtaaagaaacaaatcagcataaatacagtgtcagatgctgaggacaagcaaacagcaggaggtgatggatgctgacacggagatggatgtgcctgtggccttggaggcagtcaggaaaagtctccaggcaggtggcgataggagttgagatcaagatgagagatcgcagctttgtaaagaactagaggaagaacattccaggagaaagagactacaaatccaaagaactctaaagaggcaaggggtttggtgtgctggagaaagagagcatcccaggaaggctgtggctgagtgagggggtggcaggagccactctgggagcagaccttgtcaggaagaggaggctgggctttatgctaagtgccctgggaagccatgagagagtttaagtaggaaagtaaatcaccatcatcctttaaatggaatcaatttagctttatacaaatctcattccattgtccctgttttttctcattcatttcatgatggaccagtgaaaatgcaaacacgttattggtctggcatttgggagtcatggccatttgagacatggttcagagtgtgtgtctgcaaggatgggagggtgatgagttggggaagagctggcagtgtactatcttattgccccaggaccttccgtggagcttcacagtggcctgggagagacaaggcaggtgcacccatgctatagttaggatgtttgacctttgcaaacctcatgttgaaatttgattcccaatgttggaggtgtggtctaatgggaggggtttgggtcatgggagttgatccctcatgaaaggcctggtgccctccccatggtaagaagtgagttctcactctagtagttcctgcaagagctggttgttgaaaagagccggtgcctcccttgcctctttcttgcttcctctcttgccatgaggtctctgcacacacgggctgcccttcccctttcagcatgagtggaagcagcctgaggccctcaccagaagcagatgccagtgccacatcttgtatagcctgcagaacattgagccaaataagcctcttttctctataaattatgcagccttaggtattcctttatagcaacacaaatggactaagacaactcacattatgcaaatctgggagattgacctttgggacatctggatccttgggatgaacagggtctgtatgtgactttatttcaggtgttctaagagctgaccactgcagaagagacactaattgattggccaacttcctcactagaagaaaccctggctttcttcagatattaggcagccttgtgctcaagaaaatgggcccaacctccaaatcaagacagggccaagccaaacatggatatcaggttccccttgccagtaactgggctagtggtggtcatgtgatccagtactgaccaatgagatggctgggaaaatcagtggggagcttctgaaatatgggagatgttccttcttcctccctctctgggagttgtcatgtgagaggctgagcatggcagccgttttgtgacgatgtggacaagagactctcacagaaatcaaacaaggaccctgagatagctaggctgttgctgagacaggtcctggcwtcacctacttctggattttgtgttaaatgagaccaataaatgtcataccttttttatactttactaagaagccacagtggacaagagcttgggttctgagtgggcttaaatctctgctgagccacttaataccagggtgatttgggggcatttctctgtgccccagcttattcacctgtaaaataggataatggataataataccgtctccctcatagggttcttgtgagcattacatgagtaaatattgtcattcatagccagcggaagaaacagaaaaataagtattgtaggttagtctcatacagtttcccagaggaaagagacattaactcagactatgggaggcagggaaggtgatgctgaatatgggctctgaaaggtgaataggagttcaccatgtggggtaaagaagatggctggggttggagaaacattctaagctgtggaaatagcaggagcaaggcctctgtatcagatatctcgtgctgtgtaacaaacaactccaagatgtagtgacttaacacaaaactattttattatttctcatgtctttgtggattggcgcttttggtttgtgttttgagatggaatctcactctgttgcccaggctggagtctagcagcatgatcttggctcactgcaacctccacctcctgggttcaagcaattctcctgcctcagcctcctgagtagctggaattacaggtgcctgccaacacgcttggctaatttttgtaatttttttagtagagacggggtttcaccatgttggtcaggctggtctcaaactcctgacctcaggtgatccaccaatcttagcctcccaaagt

SEQ ID NO: 8804 - DNA, 193702 bp, Homo sapiens
  misc_feature (1)...(193702): n = A,T,C or G, or insertion/deletion polymorphism (see Tables 1-2)
aaagaagacatggaccttctcttaagaagctcttagtctattgtgatgattctccaaatttagtgagcatgaaaatcatctgaagagtgatataaaacagatctgcactttataaaataaccccgggtcattctgatacaggtggttcccaggctccatttctaaacccactggtctggagggagagaaagcatttcctttgatcattggaattctaaccatccttcagggccagtcccagtggaactttccatgttgacttagtcatcacccattttctttccttctctagcacttaatctgtgtctttctcagaacactgaacaccccttccccagtttctatcttgtactgtaggtcctttctagaatgccctgtctaagctactggtcttctggataggtaatctagactgtgtctgatccgactttgcattctctgcagcatgtggcacagtgcccacatatacttattatataagtcatgcttgttgaatgaagggatctgtctctaaatggagagttgtatttttaaagtggacctgtgatatataataatgtattgtgatcctaaatgtctcaaaatggagtcacttatgacaagtaactcaacccacagtaaaattgccaacccctcaaagtgatacgcatacgtatggtggatcgtgatgataagataatacctgctgtggccaggcactaccccaccaagacccagcaagaaagggaagccaaaaggtggctgagctaatgaccatgaactctcctggggagggccataaaactgcaaagaaactaaccatggcaaagaagcttgaagaagctctgtctgtgagaactctgaagcctcctttagtctggcagtggaagctctgctgggtcctcccagtagaggattcacgtggtttcttcctcctctttcttattatgacctatgtgtgttacatgtatttgcatagttattggtgtatgaaagccttgcaataaacctttgaaagcatttaattagccattattgagtcattgtgaaacctcccacagtgttaaagtaagcacagctaggctgactggaacctgacatgataacatggatacatgtagtgacacagtgcaggaaataggatgttttcagaggcagaacacgaggcacaaagcctcatagatgggaataagcccatgacgtgtggggagacactaaatagcctggctgacagggagcaaaagatgctgcataaggagggaagagacaggaatgggaaggaggtagtggtaaccatgaacgttgctggaatattctggcggccagctggagaggaagcttagggagtgtcagagatcaagtgcagtgatcccagcaggcagcacaaatggactgtggctctctctcctccagtattctgccttgccttgatctccctggactctcagcttctcttctacccaaggtgcccatcaggctctgcccaagttccttttatcacaggctggaaactctctcaaggcagaaagctggagaaactacagcgttcagcttgtttgtttcccatctctcatctgtccttcgtggctgctctggctgctgtgtgttggagcctggagtggagaaggtgccaaggtgggcgtggggaggccctttggaaggttagtgcagcagctcagatgggctatgatggcctctacrtgggggatgcagtggagatggagagacagagaagtttgagatgtatttctaaggtagaagcagggcttggtgaggatgtagagttgagggagagggaggagtcaagggtgattgggctttttcatcagtataaaggtgatactagcatggggctggggtgaggggaagatgagatgatgcttcctccagattctgaaactttagtctgaatgcaaggcctggctgctgcttctgggggtggggaagcttgcctgtgacctggaggacctgcaggccatctttgagttcaaagcatcttcagctccatggctcagtcctttccaatcacattcttctcttctttccttttcccttcttttctccctgatccccagctcaattctcaattcctcccagagctcttgaccagagaaatcctgatcagctgatgatctgcatgtgaccatgaccttccgtcttcatatcctccagagtggggctcagaggaggctccacactgaggacctgtggggcccaactcactctgtgctgaaggtgacagggtggggggaggaaggcactcatccaggattccttctttttttagagatgggtttcactctgttgcccaggctggagtacagtggcatgatcctagctcactgcagcctcaaactcttgggcctaagcaatcctcctgcctcagcctgatgagtagctgggactacagatgcatgccaccacacccagctgatttttaaattttttgtctcactatgttgcccaggctggtcttgaattcatggcctcaagtgaccttccttccctggcttcccaaagccccgggatgagccaccgcacctggtcccaggactgttccttaaaattatccttagaaaagttgctaagcctgttttctcatcagtagatctatgaatctggctcattatcacagctgacatcatagccttaggggtttcttgtttgttttttaccttatcattcttctgtttgaatttttttattgtagtcaaatatatatatttatcatcttagctatttttcagtgtatagttcagtggctttaagtatattcacattgttgtgcaaccatcaccaccatccatctccagaattcttttcatcctgccaaatggaatctttgtgcctgtgaaacaactccccatcccccccccggcaaccaccattctactttctatccctatgcattttactctctctctctctctctttttttttttttttttttgagatggagtctcactctgtcgcccaggctggagtgcagtggcgcgatctcggctcactgcaacctctgcctccgggttcaagcgattcttccacctcagcctcccaagtaggtgggactacaggtgccagccaccatgcctggctaattttcgtatatttagtagagacaggggtttcagtatgttggcgaggctggtctcaaactcccgacctcgtgattgacctgccttggcctcccaaactgctgggattacaggcgtgagccaccacgtctggcggcattttactctcttttataagtagaatcatattggtccttttgtgactggcttatttcacaaagcataatgcctcaagttttatccgtgttgtagcatgtgttagaatttcctcccttttaaagactgaatcatattccactgtatggctataccatattttgtttatccattcattcaacagtgaacactaggttgttccaccttttggctattgtgagtaatgttgctatgagcctggatgtacatctatttgttaccctgctttcacctcttttgggtcccagaaatagaattcctggactatatggtaattgtgtgtttaatttttggagaaatcaccatactgttttccatagtggctgtaccattttacattcccaccagcaatgcacaaaagttctaatttctccgcatcctcgccaacacttattttgttttgtttttttttttaaatagccatcttactgggtatgaagtagtagctcattgcggttgattcaaatttccctgacaattagtgattgaatatccttcatgtacttattggccattatatgtcttctgtggagaaatgtccatgtcagtccttggttcattttcaaattgggttgcctgttttgttgttgttgctgaggtgcaggaatcctttatatatcctggatattaatcctgtatcagatatagggcttttgcacatattttctcctattctgtgggttggctttccactctgtttatactggcctttgaggcacaaaagtctgatgaagtacaatttatctatattttttcttttgctgcctgtacttttggtgtcatattcataatttgggttttaaaaacgatttttttttttcggcagggcgtggtggctcacgcctgtaatcccagctctttgtgaggctgatgcctgcggatcgcttgaggtacggtttgcgagcagcctggccaccatggtgaaaccccgtctctactaaaaatacaaaaattagctgggcttggtggcccacccctgtagtcccagctacttgggaggctgaggtgggagaattgcttgaattcaggaggcagaggttgtagtgagccaagattgtgcctgggcgacagagtgagattccgtctcaaaaaaaaaaaaaaaaaaaaagaaagaaagaaaaaaaagaaagccgggcgcggtggctcacgcctgtaaccccaacactttgggaggcagaggtgggcggatcacgaggtcaggagttcgagaccagcctggccaacatagtgaaaccccgtctctactaaaaacacaaaaaaattagctgggcctggtggcacacgcatgtaatcccagctactcgggaggccgaggcaggagaatcgcttgaacccgggaggtggaggttgcagtgagccgaggtcacgccattggttagtaaactccgggctgaaaattcatatcctaagctcccttcagggatccccatttgccctgaaagacaaggctggtgccccagtgagatctgaaacatgctccaggaccaggaccctgtagtttcatcaactgcagacagtgcgggggaaaaagcatttcggtcttttcatttgttcgtcatgttcaaggtgcccccttatgttaaaaaattaaaaaaaaaaaaaaagaaagaaaaaagaaatctcctggaacggagaatctatgaaatgtttcaatatgtattcattttggggcactaccttttactagagcaaagaatcccctacttagagggaaccaatggattggttacaccgtgttaccaagtcctcaggagggcaaactgaaaagctgcaagcactgcccggccagtgttcgattgcttttggtggactagtgcgtctgagtagccatctgtaatgtcaacatgtggcagaaagtttctccgcacctccctcgccccagctccactcaccacttagtgtatgttttaaagcaataaagcgatgggtctgcttagagggggttctaaagagaaagataaacacgggctttattaagtatacagcagggcaatgtgacgggcgaccacgaagggaactcagggagcctctcagcagcccggcctcctttcgtaacaaaactggagtcaacccgatcattttaggggcgctgggtggaaggctggcttttccagccaaggcaggatgtgctggctttttctctggaggtgtccaagagcgcagagagagtgtctaatggtgacttcggattctggccactcgggctctccctgggtgacagagagagtgttccctgctgcttggtctccttcaggcgtcaaccagcgcacgcacttggaaactctgaacccggaggacgttctgtacctctccatgccccagagccgtttggggaagggcccaccttaccccccgccacccccggggcacagcagctccccatcctctcgcccaacacttgctaggtagtttggggtgtagaagcgaccccagcagcagcggcaccttaggtgctcgccgaaggtgaacgctggaccgccccgggaagggctttgctcccgacttcatcccgacgctggtgcaacgggaaaaagagagagcccgcgcgagtggggccagggcgcgcaggagagggcgggcgagaaagtgcccggcgagggcaggcgcgggccgagggcggggcgggcgcgggagggcgcgagaggggcgtgggcgcggccgctcgctcggccgggtcgggccagggggaggggcgctgggagagcgagagcggcgcgcgcggcagccccgaggcagcagagcgcggagccgggagcgcggggagcgcgggccggcggcggcgagggaggacgggggcgcagacggccggcgcgcggcgcggctaccatgggcgtgcggtgagcagccgctcgggacgacttcctcggctgcgcggcgctcgcgcggagctccccggccggcggtgcgtccccacggtcaccatgaaaggtagggcggcggcagctccgcggggctctgggcggggggaacgggcttcggggcgcgcgnnnnnnnnnnnnnnnnnnnnaggtgcatcccgcgcgaaccttcccttgggctgcgggcccggggagtcggggctgccagggcgccgggttcgtgcgcggacactgggggcgcacccggctcccgggtcaggcgcggctggagacctcgaggttggggttttgaagcgcgcaagtattcccctccccatcgcgtctttgcaagtagtttgaagccctaagtcgttgtttacggattcccgtttccaactttttaattgaaaaaacctgccgaggagagtggaggcatcgccatccctcccggtcgcttttccacgccgcagcgctccccacgctcgcccagtcctctctcctcccgcctctagccgtttcccggcccgagcggtccccgcgctggcggccgggtgttttctccgggactggggatgttctccgtgcgccctcgccacatctggcaatgattaggtgcccgaggagttcagctggctcgggaagtgcatttggcatctttctccatcagattcaccgactggaaaatagttgccctcggttccgcgtcccttccacgtgcccgccttggggtgggtgtgcccactggtgttttggggtgacacacctcagctggttagtcgccccctgcgcggtgtcctctgcaggccggtttatggaagtgtcagatgttatcgtactttagaaagaagcacgagaaggactgcagggcagccttctgtttagtggaaacacggagatttgtcagcagaatcctgatttatgtatgagataagtaaccgcagcggaggcatcaaagagtcgttcaggaatgggcccgcgtggtgtttacacaaggcttcgtgtgagagttgctggttctgtgctaggataacacagccctgcgtgggtgcgaaatgccatctgaccgcggtcaccccgcttccagccgccacagacctggcgatgcaatcgctttgacttctagggttgccgtccgagggaggcgcccgggaagccccaaggcgcttggaaagtaacttttggctctggaaagttttttttctgaagggcagctcccgcggaactaaccggagcgatgatatcctaccaattcactccctttccaagggcgttaggtgtccacgtcgggagacctcgggaagggaggtgactgatggccaggtgaaaagtggtctgccccagggaaaaagaaacaaaagacacgatacaactgtctacctagagaatttcaaaatgcagtggcttgctttccttctgtctccatctcagtttctcttccctcatttacattctaggaaatacacacattccttagctggctctgattgaggagactccctagaaaggaaagaatttcacatggctaaaagttatctggggctcagttatcattttagccagaagtgaatcttctctgctggtcattaagaccagtggtttttaaaacttgggaagattaaccacctacccactccatcagctcccacgtgggttcttaaaccctgaaacttttgttatgctttttactgggtaaaggaccgctattgcacttgagacacttttccactttacatttgcactggaaaacatacccagaagtcctaaacacatttttggagagatttatgctgcattctggaccagatggtggcctacccgctgtggtctagcgctgcccagaagccccatacactttccgccccagtcggggaggttgatggagggacggactggtgaatccccgggtagactaatcattttgaagccctcttttaaaaacgaaaatattccagcggggcgcggtggctcacacctgtaatcccagcactttgggaggccgaggtgggcaagatcactcgaagtcaggagttcgagaccagcctggccaacattgtgaaatcctgtctttactaaaaatacaaaaaattagctgggcgtggtggcaggcacctgtaatcccagctacttgagaggctgaggcaggagaatcacttgaacccaggagatggaggttgcagtgagccgagatcgagccattgcactccagcctgggtgacaagagcgagactccgtctaaaaaaaaaaaaaagaaaaaaaatattccatgagagttttgcctaccaattattaccacgtaatctgtatttattacatttgtctgagtggtggggtggggacgggaggggcagtaataattttttagtacctactaagtgccagccactgtactatatacactacaaacacattgcaattaatcctctcaacagccctgagagtagacatttcaatcctaacagtataggtatgaaaactgagtctagaagaaataggaactggcaactaggaggatagagtaggcatctaaagacaagccttgtcagttaccccgtgtggcttggaaggccctaagacaccaaatagataacctctggtgaagatgactggaaaaaaaagtgaatctgagacaactaactagccaagtaacccacaattggtgctgtatccaggaagaggtggagccaaccagttgcatgtgaggctttggaagcctagacaaaaacggaaagctgcttttaccaagtggaattgttttgaccatttgccatagggaaccaactaaagattttccccgggttcctgattacatcaaatagttgttaactccccgtgcttcagaaagccaacatgatagaaagcaacgacaagccttgtaaattcttrgaataaacgtgttaatctaaaacattcttggccaggtgcagtggctcatgcctgtaatcccagcactttgggaggctgaggcaggcggatcaccatatagtgaaaccagcctggccaacatgtaatgaaaccctgtctctactaaaaaatacaaaaattagctgggcctggtggcgcatgcctgtagtcccagctacttgggaagctgaggcaggrgaatagcttgaacccgggaggtggaggttgcaatgagccgagatcgtgccactgcacttcagcgcaggtgacagaagcaagactctctcaaacacacacacacacacacacacacacacacacacacacaccccattctttagccaaattgaaaatcagtggacaccatagaagttaaagaagttcatttgcaaaagcaaatattcctgtgcaagtcagatgcctttttagggtaccaacgtgactttctaattctgatatttaaacctggatatggcctttgtagtgaccaggctcttggagtgtaatcctgcatctgccagtcagtcacagcgccacctatctgttgcattcagcaaacatccatttcctccatccctggagtcacaagtaccaaaataatgacatcattatatattacccagaagaaaatgactttccccgttgctgcagtacttgaagtcttccaaactgattaaaacatgaagtttgttttaatttatttccaatttcattttcaattagctgtactacaccatcaatctcatggctttttggatacatattcacattcttgacgaaggaatctgactcctctagagttacgtgtgtcgttaactaaatcacattcttggttcttaaagttggggatattggttagtttcagtgcagcagcacttgttgcctaagagacaaccaaaaacagctgccaccacccgggaccacagaggtccaaaccagtgttataatttaacacagagaggaggctggtgccatgaaaacacagtgttcagctgcttatttttgtacttttgtgcataaatatttctgaaatacagtttggcaataatatatttaaaatgcactagtaagcagtatacttctcccaaagttttttgggactcacagtctttttgctttttcagtgtctctctgagatttcttgttcttaactgggataagcaaacaagcctataaaggcaattgcatttaacattgaaagagtcatattttctaaaggaaaatggaaacaaaatgaggcctttttcccttcactgattggtaataggggctgcccttctctgggaggcaaatttacaatctaattatacttttgacttttcattagtttgggaatgcttgacattcttaatctgaggtttaattattgctaagtatacatcttctctgtggtctcctatgcaatttcccacggttgttccaatggctccaaccctttgccatgtggctcatccactgataatggggtgaatagaaaaagctagccgatgatggctttcaggctatgtcataacagagtatctcattttcctactaaatgcctattctcattataatattatttcaaaacaactcttgcaaccgctgccaaataaagttaaatggaccttgaagtattagctttcaaatgggaaaatggacatttaaattttgtgatagaaaatatgtttcaccctgggtaaaaccagcatgtgggtaatctctcagggaggccagcctaacacagacttccctttaataatagctaacatttattgagcacctgccatgccaggcattatcatttcctccattttatgataggaaaacttaggttcagagaggttgtgttacttgtctaagggtacccagctagttggtggcgggggggatcagtattcaggctcagactgtctgattccagaatcacatgtgtaatctctagcccaggctccctcctagctatgccctaataatgcattcaagtcctacatctttgtgaagtcctactgtgtgctgtcacgctccactagatactgagtgagcaasgtagacaaggcgctatcatccggacttakaactgtaatgacctagcatcaaaggtctgaaggattgatgtgttcttcagtcagccagtggaggagacgctctaaactggagctgttgcaaagataaagcagatttcaggattgcttccctgtgtagcttatcttctgggaggttttgcttaccgctgattgaatgaatgtggatggcccactgtagccaccaactctgaaaacggcccctacactcgtcttgctaacaggtttgcattgagaaaatgaaatattgtcagaagtgccattttcatgaacagactgtaaccaccggtgagtgatcagtaaaaataatgatactactaagtattttaaaccaggaacagggaagtatagacatttttcatagaaggttcattctttactgctgacaacagagtttctaaccacaccaaccatccaaaccttaagggaagtaacttcttagtcaagcagtgatttgatttctttttcagtgcatgacatttgaagaaccaaaaccagcatcatacctcaaaaaggtcctgctgattgcttaagggtgttttgtaattatacagcagtgaaagccaatataaacataaattagtaatcccaaattaagattccaaagagatcctaggagctctcttaacttctgaatttgtcatgaatattccatcaatactcttaaaaatagaaaagaaatgcatttttcagcatgggggttttaaaatgaaatacacttattggacttggatatattaaacatgactcctttatgcttcctgaatgatgkgatatcatacctcagtatcacgtgaggtattattcactagcctgtgacgttggatgttttacatttggtgtgaaaaactcacttgtctctggctctgtggaagaagccacatttcttttgccccagtcattttcttatgacagagaaatgttaggaaactagctgatgtttataaaacaatttattattcaaaggcaaaacagtcctactttaaagtagataatatatgctttaaaatataaccatctcataaaatacaattatgtttagtgatcccaggtgttgaatccaatcatttctgtgtgctgggcgaggagtgtgggctctgaaaccaagagagcctggkgacctcaggcaagtcacttaaccccctggggccccagtttctttatcaatgtgatgagggacaacaatggcatctacttgatgttgttttaaggattaaatagttgtttagaatggtggctagtatgtaataggaactcaagttgttttagtaattgtaatattgtattataacctgctgcttcctcccagcaataagttaattgccaattatgagccatctatgttcatttaatcagtgatgtagtttagaccatgaaggcaaatgttcagttctgaaatgaaagtaattttcaaattgcaaatgtgttaaaacagacctcagggatagaaggagtgagttgtgctccacgtggggaagtattagtattggttgcattccagctgccgtcactgctatcatcataaaaaatgcagggayaattcccaaagtgaagtttgtaattgtagtaatgaaacagtttttctatttgttatagtagtggtagaaaattgataaatatgtgtaagtatatttagattacctaggagcactgttttttttttagtactattgctcacgtgcctactgatgacatgatatttttaaagatctgtgtttcaaatccagtgtccggttttatccagtaaggatatgacatcaaggaatcacaacattaaacaartttgtctctaaataagtattcggacagatgtatgtataagtatgtttttaaaccatatgatgtcatgtctatttcatcagtagtattarttttccattaagctgtcatatttctgttttattatttataattgggccaccaagttctaactagccttcatttattctttaaacaaatatttrgtattaactttctgtgtgcaaggccctctagaaatgccaaataraatgaataaaatatagcttctgtgctcatggagcttgcagtctggtagacaagacaagacttatgcgtaaacaactggaatccaaagtagagagtagaacatgccctgtttgaggttcagataatctggctgaagacagggacattttcatttgcaggagagatttgaattatagttcatatttcagattacattatatttcatatcttgaattatatttcatattacattaatagggcaagcaacattaaagaaaaatgtcttaaaagagaggagggctgagcctgatgactcgtgcttataatttcagtgctttgggaggccaagatgggagggttgcttgaggccaggagtttgagatcagccagatcaacacagcaagatcctgtctccacagaaaatttaatgggtgcggtggtgagtggctatagtcccagctacttgggagactgaggtgggaggatcccttgagcagtggcacagtcttggctcactgtaacctctgtctcttgggttcgagcgattctcctgcctcagcctcccaagtagctgggactgagtacaggtgcgtgccaccatggccaactaatttttgtatgttttgtagagacagggttttgctatgttgctcaggctcgtctcgarctcctagcctcaagtgatctgcccgcctcagcctccaaagtgctgggattacaggcatgagccaccgtgcctgacctgaaatctcttaagtgtgacatttcagtgtgggaggtgagaggaaacmaaattcagagtcttcttgaattgtgtctcttaaactcaaaaygttggtccaacatttgtaaataattatagtatattgctttggcataattgtttagataatctaaacaacgttaatggatttcaaaacaaaaagacgtatcggtgttatttttaaaccaaagacctctttttttttttgtctccagagaaatggacagcattagtttttcttgccaaatcacccatgtatttgaggccctgccaaggcccttattcaatttaaggcagagattcaaggcctcattctgactctcttattaacatgattaaaatgactggatgagaattttcctcatagaagaaagggaagtgcatcacctccaccataatcacctatgaatgatgaatgcagatgtcaaggttttggatgtcgtacttactgattacttctaagttcttgcagttggtggctgtggggaaatctgatttagcccccactgccaacttaggggtaaaagtaacaaaaacaccctttctcagttttgttagactgtaaaggaaggaatagggtacccatrcctctttattctaaaagcaagtatctgccatttttacaagcatcagaattgcaagttgtgccagaaattggagtcattttatgtctataattttgacttttgacttgaaaaaactrtgcarttgaatcaaaagtgatcccattgttgcaaaacaaattcagtaagcagctgagtaatcaaaatgaatctcctgtgatactttaaaataatctacaagtatttaaactgctacagattccttcatccatttggagtgaaacagttgaatggaaggccgatctaattacccccctacaaaatatcctgaacctcagatactttgttacgctgcattgagttcattcaccrggagaatacataataactgtgttccagaaatgccaagactggaaaaaggaaaccatgcggggagccaggtttacatttgtaaagctataaawccagggcaaatattaccgatactgtgcttagggacatatcaagataaaaggacacctttcttcagtttttacagcccaaaatacgttaagataaattttcatcaatatcaaccaggtacttcagtgccaatttgctgaagcccaaatagaacctgcagcacgcattactcttttgctcatcaagctttcctgttggtccttcccccaaatartcacctcagaatggagttttgtgtcttttgaagccagatgattaaagttctaggatatttattttggaccttaaggcatagtagcttttaccactgcctctgtcctcttacttcaaagaaaattcatatttattaagcagatggtatgtgttggatgttttccatgtgtcagttcacatttccctccccaaaatgtgtgagataggaatcattggttccagcttataggagactgagaggcagacatgagcttattgctattacaaggtggagccagtcttcaaacccaggtctttgaatttcaaascccacacattaccattaattctrtcagcctctggtgttaggaaagaagtcttccagatatcacagcaacatcaaggggacattccaaatatttagcaacccaggtgacacactgtggaagccaccattcccatatgaaagcaactccttggagcactggtcagtggagagtgactgtagactcaggggtcctgatggccccagggatacaggggcaaggacctgctacagtgggtggtggtgacagtagaaacagggacagcttgcagaaatgctcagagcagaggccattgttcttcaaccagctggtttggaagcacttaaatattttaacaaccagtgataccataccattttgttctaagagtaatgacaaatgtacaagagctgggaatggaccctggtctaaacacgatagagcaaccaatggrtactcatatgtagacagcgccagtgggccagcatggaagagaagtctaacttcagcctagtccctgtccacagtccttcaggctggctcctaaaaatgtctgcatttgctatgatgtttggtttggcatttgttggaaacctgctttgtgtcaagtattgaaggctccagcttcaaactgcgtcttctgtggtttcaggttgaactccacactctggctctttgggggcattttctggttatctggttatcagtgctggttatctgttggacctgaatgcttttatttttgtctgtctgacttttccattcatataatcttattttgcttgttttacattatttcttatcaaagttagagatgtacatagtttaaagagtcagataatgtcgtaggtttcctgaaattcctgaaattctgaaaaacagcagtttcctacccaggccaccttcatttcattttccattccccagaggtaacctcttgataactttttttaccattttcttgtggcwtttacacctctttcagttacctgctaatgcctaaaaaaccatcccgaaaccctgtagcttagaacagcagctggttttttgctcacrattctgcaattcagcctggactggacacgtggctgccctcaggagcctggagaatyactgggggtggccggaatggctgagggctccctggctggtctcacgttttccctgctctcatcctccagtgattctctctctccaggtggcctctagttcagcaggggaggtgaacttttcacagagccactggctaccaagagtgtagtcagaagctgaaaggcctctaaggccggggccctggagccacccactcccacttcygccacattccatgggacagagcaggtcatggggcctgcccagattccaggggaaggaagtggacttgcgcatggagggctggaaggaattgctggtggtcctttatgacgatgatctgccatggcccccgtatctctccgtgacatgcttacagtgctcttgcttcacttttttttcatcttaagtattatatacagacttccttttatagcagaagagggttttgttctctttcaccttttaccttcccctaacaacccttgcaggtatctcctgttcctgtccacctttctaatacagttacagcgtaatctcagatccacattcagtgttgatattattgtgacaatgtcagtgcgactcacagctgagtcatgtttcttgcatagctttttgtttcccccccacgaagttaataatcctcttgctattttagctcctcatatatacatcattattcatctcccaagtcccttctactttcccaaatctctcctctgtgtgttcaaacatattaggaattctttcatttctatcttctcgaagaaatcttttctggagcattctgaccagctgagagttagagttaggttaggatatatacacacagacacacccagacatgcacacactcagacacatgcacacacactgggtttgttgcttattttagtgcartgcattctccagtaacttcctgagacaagtgtgtgtgggatgtacatttttggggattctgctggtctgcaaaggtctttatgttaccccctcattgaactgagagcattctatattggaaataatttatccttagaatttcgaaagcactgctgtatttactttagcttccaactttgctgctaaatgtgaagctgatctttttttctttgtaaaattcttataaatgatctgtttttttcctctgtctggaagcttttaggcttttatttttgtcttcagtgttctgaaattttatgatgatgagccttggagtggctgtctttcctttctttgttctaggtagtgatgggcccattcatcctggaaactcatgtccttcaatgctgggaaatgtggttcacttactcctccagtgcttccctccctctgttctttttccgggaaacacctgttatatgaacattggaccctctaaattgattttcttttctttttttttttcttttttttgaaacagagtcttgctctgtcgcctaggctggagtgcagtgacacaatctcagctcattgcaacctctgcctcccaggttcaagcaattctcctgcctcagcctcccgagtagctggtattacaggtgcacaccagcacgcccagcgaatttttgtatttttagtagagacggggtttcaccatgttggccaggctggtcttgaactcctgacctcaggtgatccgcctgccttgacctcccaaagtgctgggattatgggctgcaaagtgatcccagtgagccactgcacctagcctctaaattgattttctaatttttccttatttttacttttttctatttatatgcctttattctactttctgtaatattttgactccatcttccagcccttccattgagatttatttctgtgatcatattttttaatttccaaaagttctttctttttctcttttttgagatggagtcacgctctgtcacccagtctggagagcagtggtgctatctcagatcactgcaacttccgcctcccgggttcaagtgattctcctgcctcagcctccctagtaattgggattacaggtatgtatcactatgcccggctaatttttgtatttttagtagagacgaggtttcaccatgttggccaggctggtctcaaactcatgacctcaagtgatccacctgcctcagcctcccaaagtgctgggattacaggtgtcagccaccgtgcccagccctttttctctggtggttgcttttttatagcatcctgttttccagatatattattttctcttatctctgtaagtgtattaatggtatttgtttttttctgaggtattaattttcctgcataatgtagatttcctctcaattgctttatctggtttctttattttcatctttgtcttttcatgttagaggttgtatcagttgtctgatgaccctcaactgtcttatttaagagcagaacattacacaggtcaattggaaacttttgtgctggtggattttgtgaattgtgaccatcactctaagtttacctggttgggctgttccactgggaacctcctggaattagaaccattagtttatttttttattagttggtcaaattccccagagaagaaccttctaatctttaccatggaggggactttctggctaagtgggagaagaggactcagggtctgagcattcagttggtaaacttttgcctttcccctgatttcattacagttcctctcatttcctgttcccggtgtccactagacaagagaacttttgttttaatgtttccaagtagtaaaccttgaatcttctgctgtggttagggaggggcagtcacacagctctttgggtgggcagctccaactccttctctttttttcacatactatacaaatcatccacttaacgtgtacaattcaatgtttttttgttatattcacatattttttattcatcatgataatcaatttcagaagtttcaccaccctaaaaagaaacctctacccactaacagtcactcctcagttcccctcaaaaccaccagccctaggcaaacattaattgctttctgactctagactttgctaatgtaaacatttcatataaattgaatcacacartgtgtgtgtgttttttttgtgactggcctcttttacttagcataatgtttttgagatttatctgtattgtagtatgcatcagtgcttcattttttattgctgaataatattccactgtatagacataccacagtttatccatttatcagtcagtgaacctttggcttgtctccccccctttttttgctgttatgaataatgctgctacaaacattcaggtgcagatttttgtatggacatatgtttttatttctcgtaggtataaacctaggagcagaattgctggattgtatggtaactttatgtttaactttttgagaaacagccagactgttttccatggtggctgcaccattttacattcccaccaacagcatatgagggttctgatttctccctatctttgccaacacttgttgtctatctttttggttatagccaactgcttcttaaacttatgttccaacagtcctcctrttttagcctcacctttattcccaaattcctaaacctgttcaggattctgcaatatcaatcattgcctcttagctttcccggctgctagcacaggcttcagtttcatgagtgtacgggtcagtcaccatcatggtgtggaacccctgagtcccacrgacctgtgtcttcctcttgatctggccactcataagctgtgagaccttgggtcaaattaatgtaatttctctgacccttggttttctcatctgtaaaacagaaacataataaaatgcagccaggtgtggtggctcacacctgtaatcccagcactttgggaggctgaggcaggcagatcactcgagaccaggagtttgaggccagcctgaccaacatggcaaaactccatctctactaaacatacagaaattaggcagrcataatggcgcaggcctgtaatcccagctactctgaggctgaggtgggaggattgcttgaacctgggaggcagaggttgcagtgagctgagatggttccactgcactccagcctggatgacagagcaagattctgtctcaaaaagaaaagaaaaagagaaagaaagaaagaaacatagtaaaatgtgaaatagctggcatacagcaggtactaagtatattagtctcctctcttctgcaaacatggtgagtatgcaaaaagggaaagactttatctttttcctttaggaattcatgaactagtgggaaagagagtgacatgtataactctaatttccttaattttcaacaactactgttcagtgcctatcatgcrtcataaatgtgttagttgttgagggtacaatgtgatgagtttcctgtctttaaatggctttccatatggaggagtccgaaccagaactggatataaggcagatagagttaagtgctgtcacactgatacaagggagcatacaagaatgagaggtaaattctgactgtagtgctagtgcccaacttggtccacagattgactggaacatgttaatgtggatgactctcagctctaagccaacagaaccaaacttcacttgaactcatggttctctgaaatagcaaggtgcaaagaataaatcagcagccaaattctgttcaacattctctgtcataaaatctctggccccaatgtggctctgtgccagttactgaggaaagtagaaaaagataaataaaaatcacatttcaaaataggtaagcaaaatataacatagcctgtaggattaaaatgaaaatgcaaaagttcagctgtgggagccaagaaaatatgagcttaagacagaataaatcttaaacactttctgtcatttaatatgttaaggttgcttcttccccrcagacagatggctgtcagaaacagggatcaagttatgaccactgcaggacttagaggtcttaaatcttaaccaagtccttattcatgtaggagtgtggcagttgtgtggctatgactgtcagagatagacattgggaagtattaagttgctaaagagactgacctcagaagaatctccttatctgagtacatcacttttgcaggccccgatactgtaaagacaatctgggatacaacacattgagcttgggtctatatggtgtgaggaaaaggttttgaggacagaatgtagcattgcacattgtatcaggctatttgtcttcatgaaaacctgcctgtcagcccttgtgggccctagcatagccttctgccctctagcatgttttagtcaatggggacactgactactcattctctttcccgtggctatggttgcatgatgtaaatcatctccacaaccacaagccccaccagctttaccctcttcctcttcctcaagtccctaaacacccaactgttctatcagcctgaatcagctgtttgctaactgagcagctgggaacatctgggagtgggcctgggggaacacctaagcgagtaaactgtgcaccaagctttttctgccctgaatccacccaactcttaagggtagcaaaagaggattctaaagtcaacttttgaaaacattgactaaaacaaagttaaccattttttttcttctctttgcatatctcacagtctctggtggttccaaaaccattatgaatttccaagaaagggatgtaatatgcagtgttttccaatctctatcctcgcccccaaaaaacaaaaacattgagagagactgatttaaggcacttctgtataattgcagtcagaagtaatgtgtggtaacttaaacttgtacccctcatgtctcttgtgattttctctctaattttagagttggatgagatagagactattttattcttttagtggctgttacaagaatccctaatccttttcggatgagggttaagatgagaagcagggaacccaccctgtgctttatgatgggtggcctgtgaggcctttgttttcttgaactcctcatgggtttggacatgttaatttggaggtagaagcaggacacagctaaattgctttaataacaaaaatatgtgaaatttgaagttcccagggaaatttcaggaaggagagagaagtcagtcagactaaatgctgcatgggaaaaagattagagagggaaacgaaaacaaacaaacaaacaagctaatggtagccctgctgaaatgaagcttttgggggagaatagacatgtctaatgggaaatttgaagctgtttgctatcaagggtgcagcatgaacctcccttcttgtttccactgtgacatcttcaatgatgtttctgtggcccacagtgcctragtgtgagtggattctgctgcagaggtggcacagtggtggaaaggatagagctggccaagggcacggatgtctgggtaccactgatgctgatattcatgtctcatcaactccgctaggctgtaagcatgtgtttattgaatgaatgaaaaaacaaacgaatggatatctaagcagacgcagcaggtcagcgtttctcttaaatggagaatagacgaggctgcagccattaacacgacagattaccacatcaagcattaataggacagattagtaagtaaagcaggaacagagcatggrcttgatgtgtgtttgtggaggtagccaatcactgaatcagagaaaaagatgctgttctcttggttgtaggcaagttcttccattcagaaagaattaaagcttaaatccctgccataagaaaaccactttgagtataaatacctggccttctagattccaaaccaagatctcttccctttctgcagaataaggagacaatggtgaaatacaaagatatcacacctctctgttttctgttagaaataaccactgtctcacatgtgatttttttttttttttttttgagacggagtcccacactctgtcgctcaggctggagtgtagttggcgtgatcttggctcactgcaaactccacctcctggattcaagtgattctgcctcagcctcccaagtagcggggattacaggcacctgccaccacgcccggctaatttttatatttttagtagagatggggtttcgccatgttggccaggctggcctcaaactcctgacctcaggtgatccacccgcctcaacctcctaaagtgctgggattacaggcatgagccaccacgctacagcatcacatgtgattttataaatacattgtaacaaacaagtattctgagcttcaccacattgtgtttatagatagcatacatcttgggttctccataacatttcaaggttcagatatagctagatcatgtctcttttggggattgaaaaagactatcacagaggcttcatttcccctatatgcctctctttcttgaaagccaagattgggtgggcacggtagctcacatctgtagtcccagcactttgggaggccgaggcgggcggatcacctgaggtcaggagttcgagaccagcctgcccaacatggtgaaaccccatctctactaaaaatacaaagaattagctgggcgtggtagtgggcgcctgcaatcccagttacttgggaggctgaggcaggagaatcgcttgaacccaggaggcggaggttgcagtgagccaagatcacaccactgcactccagcctgggcgacaagaacaaaattctatctcaaaaaacaaaagaaagtcaagataaaggaccatgacttactcacctctgaagccacagcctggcagtctctgtcatggtgagtgctaacaacatgcctttgagctgagttgcctgtgagagaaagttgtgtgctggggcagtaatggacccagtcagacagggtcccctagaaaggcctggctttggcacctcttacttgtcatcaaaaagtgttggccgggcacggtggctcatgcctgtaatcccagcactttgggaggctgaggtgggtggatcacctaaggtcaggagtttgagaccagcctgaccaatatggtgaaacctcatctctactgaaattacaaaaattagcggagggtagtggcgggtgcctgtaatcccagcctcagaaggctgaggcaggagaatcacttgaacccaggaggtggaggttgcagtgagccgagatcgcgccactgcacttcagcctgagcaacagagcgatattccatctcaaaaaaaaaaaaaaagtgttcctcctggacagtagccactggggcctacttgtggatgaagggtgagaggaggatgggaattgaaaaactacgtgtcgggtkctrtgctcactacgtgggtgatgaaagaatctgtccaccaaacccccacaacccacaatttacccatgtagcagacatgcacatgtacccccggaacctaaaataaaatttggaaagaaaaaaaaaagtgtcctttagttgtgcaattaatatgaaattgtgtctgcacagtgcttgcccttcctggacctttacctggcagaactgtaaatgagcagttctttagagatgtaataaggaatctcatgtctactttaggaatgagattttaggtcttttggtagaaaggttgggtgataaaacatctctccctctcttttttttttggaggtgtagtttcattcttgttgcccaggctggagttcaatggcacgatcttagctcactgcaacctcagcctcccaggttcaagcgattctcctacctcagcctttcaagtagctgggattacaggcacgtgccaccacatctggctaattttgtatttttagtagagatggggtttcaccatgttggccaggctgggctcgaactcctgacctcaggtgatctgcccaccttggcctcccaaagtcctgggattacagccatgagccactgcgcccggccgacatctctcttctttccatggtgggtatgcatttaggaatttccacagtaaggctgccttttgaaacacatttactgcgaaaccatcggttggtcccagttacccatcggaaggagggtgggaagggtttggttgtcactgcaggagttatgtcggctcctgagaggcaacagttagtgaaggagatgaccccagagcccagacatttaaaaacaggggctttagggtgagttgcctaaagataacttaacccctttggcggtcgattatttctgtgagcagaaaaagtttctgttcacaggaagcatgatgacaacagtaaattcacgcacacatgtgaggaagatatcagagagaaacattgaattagtgtagcgtggcagggagtggccgggtggtccagaaaggcatctcgaagggtcgcactttagctaagacctgaattcgaaggagtcacattaggaacagaggaagtgcatcccaagcagcaggagcagccagggtggagacccctgccgcctcttccagaaagcctggtgcgatccaygagcagaaggaaagctgctgtgacaagcaggggcgatgaagcaggtcgcatcctgccccaccctctgcttctgkgccccttgccaggattaacatcgtgtctcttcttctctcacagacgacttcgcagaggaggaggaggtgcaatccttcggttacaagcggtttggtgagtcctaacaaagctgtgttccttctcagtggtcaacctrggatgcagccacgaaccctcagagaccattggcaggccactggcaggcccttcatgcacatgggtgtttgtggctctgaggtccaattttggttggaaagtgagtgtctgtgtcccagggggagggtttctcacaattctgaggggccatgggacaggagctgcacccaggcatggggaagtgatgggatgttcatgggtctgctgaatggaaaagagacagcctactagacaaagtgtagcgggaaaggcaaatctgtgacaagacaacagcaaaatacctgaaatttttcagttttgttattcagaaaacgtctttgctcaggccttacactcctaacccagtgttcatggatgagtgagagggagacttcttccaagaatctgcctggacacaggggctctgtggcaggctggggaatggcccccaaaggtgacagcaccctgaatcctgaaacctgaatgttaccttatgtggcacaaaggactttgtaggtgtgattaagttgaagagcttgagatggggagatgatcctgggttacctgggtgggccctgaaagccatcacaagcgtccttgtaagagagaggcagagggagatgtgactgcagagagaaggtgatgtgaggatggaagcagagatttttgttatgttctctggtcaaggaatataggtggccattagaagctaaaaatgcaagggcattaatggattcttccttcagagcctcaggagggagagctgtatactycccatatttatatttcagctgrctgaaggtgattttaggccgctggcccccagaactgtaagaggagaaatctgtattgtttaagccagcacgttcrtggtaaccttttacagcagccgcaggaaactcatacacaccctctgcctcccaggctgctgcacctggtgctcttctttgctttgaccttgcttctctttgaccttgaaatgccagtggtcattgcagagtttcaaaggcagctccagggattggaggattttcccaacagcttgtttctgtgcttggccagaggaaatggagaaggatagaggagaaaagagtgtgtgtgagtgagtgtgtgtgtgygtttckgtgtgtgtgtggwgagagagagagagagagagagagtatgaaaatgaatgaatctacttcctgttgcttaaaaaaagtcctggctggactttgattagaattaacaacccccagctgctctgcctcccgcgttgctttagcatttttccttctggacacacacgtctgcattactttctgggaaaacatatgactttaaaataggaatgcagtggcaccaagctcatctctcctgcgttggttccctggcagagcggcccgygtgcagccccgtcgcccctcctccgtgctcctgttccccatctacacgattccatgtttctgcgatgagaccatggtcctgtgttctttcccgggggggacgcactgaaggcagcagtaggagtgaagatgaaaccaagaattataaaggaaaacaaacaaaaaaacacagaaagataggaatcaagaggaaaaccaaacttgtcaaaataaggcaaaataaatgtggagatgcctacatgttttggcaatcagtagaaatatgaagaaccaagagagaaagtctctttagaaagggtgaccttgagagaaaattttttataaatttctcagccatattaccagttggatgggttggggatttggtgaaaaacacacaaaaaagtacatttatgcgtgggagttgcaacggatgactcacaggagacatggtaaccacttacaaatattagagagcacaaacagaggctggaagagagtgatgccaagcggtacaaatagaagagaaggacgaaattaaaatgggaaaccttggaatagtctatgaaagagacattcctgatgctgagaattcttggattcagcctctaggcaaggcgatggatatccagcataggaccagagtagatctttgcagatggaagagtctttgaggtgttttttgtgttttattttattattttagttttgagacagagtcttgctctgtcattcaggctagagtgcagtggtgcaatcgtagctcactgtaaccttgaattcctgggctcaagcaatcctyctgcctcagcctctcaagtagctgggcctacgggtatgtgccactatgtccagctaatttttaaattttttgtagagacartgtcttactatcttgccccagctggtcttgaactcctgggcttaagcaatcctctagcctcagcctcccaaaatgctgagattacaggcgtgagccactgcacccaacttagatgatttaactctccctttgttttcacctataagggagctgaggcccagatagattaagtccttgctgaagcaagttagttggagctggggttagaagattctggatcttctaactctcaggataatgtcgttttggggaagggctcagcagtgaagtgaagtggagctgacctttcaacttctgtgttgtggagggggaccctgcagctctggaaccctaaagtggactggacacccaatctggttccactggggaggcctcatcatggttatagggctaggactctgattctttagaaggtaaatgagttttcagttcctaagaagtggccagttgaatccagcaggacccaagaacccatttcttcaggcatggttaaactttaaccattgaaggaagaccaagtcccttccatgcagcaggttgatagtaaggtggtaagtggaaggtgtccagagacatgtcaaccctctaggtcctgcccctaatcactcctgtgtcttgaaaccagctacttaaactcagtgggtgtcagatgctgcctctgcccaaccagcagggggacacctgccaacgtaggtgagtctacctcacagggctttggtgaggttaagagagatgtcagatggatggacaagtgctttgaagttacaacactataaaaacacaggactgtattatcactctcccgagatttggggctgttagcactctctcaatgttttggtacagccactgcagaatatcaaagtgtgacagacctgaaaacttactcctgaagaaatgtaaaggtgtgattttcttctaaagacggtaacattgtagccttttatagttgcaaaaatagactgggtgacatagagggtttacttattgtttaattttaggtatatattgcttatgcaagtatgataaacacaacccgaatttagactacagaagagcccgaggtcagttattcacagggcaaaggagccattgttttagcaaatcactactgggtgggcctgtttctgaagttattcatatagagagttattattcagaggtgtttgctacataaagtcaaggctgtttacataataatattgtgctttttcaaatttagcatactattacagtaaagagcaaaatgcacgatcttctgcagtgatctagcatggtattgtatttggtgcagtcaccccttgtttactcagggattcattattgcattttagtctcaaccaggtcttctgtttttcttcagtctttccatataccaagcttgttcagccccgttcccaaagttctgggcaggtgtctaaagaggagatggagtttggtctgatggttttgtcacttctttgctcctctgacaaaagcgtcaatgaggggagactttgaagggttaattaagtgagcattttcaagctttaatcaggctttgagggtcagygtttcttggcctcagtatgcagagctaattgggacgtaactatagttacaatttggcagagttcattttctgggacatgaggcaccagtatatttttattttccatagatatgatatgtactaccacgaaagtgatatttgtctatttatttcccagttacctgtttcattaaaagcatcacacgtggctctagaatcctttattattatgcttagcagaaagggaaagagaggcagcaccaccygcatggcctgggccctccctctggagcctgcattctccctttctgcactggggcgggggcgctagactgactttgtttcattgattggtcgcaatgggttctcttctgttatttttggaatctgatccggtatgataatagacgtccaaagttaggatgatggagragcaagagatacatggttcagcctgtgaaaatcacgggtggagttaagggtttccagtgagcaactgtgggcagctgggaacatttgttgtttgtatttgacaaacaaagctttgacagaattgcttctttggggctcaggcataggaattattaatagctatgagagtaaaagatctgaataatggcaaactgtgaaacagtaacaagaaagtaaaaggaagcattctctatggagtagattcaagtttctttttttggtaaaaactaagtgggagagttctaaggggattgctgaaaaattatttaggggttacagtccaaaacggggtatcagatgtcttttcctctgagatcagtaagtgtgttctttgaagcatgtccttgaatagttttgtttatccacaacttcacaggtctctctatagctatagcttcaaacaagccaggctttaactttcccctttctttcctcaaaaaatagttgcagattagcaagtatatttttaacagtttggcccacacggtgccgagcatgtcgaagcagcctgagaaatctgtgttgaagggaacccagccctgcctctcagtgcccctgcctcatgccttgccatcaccgttccctccttccaaacccagcctccaaagagataaacacatggaactttaaattcatggctcyagttaaattattgagctgtttcttgccaagaggtttagagaaactaatgtctaaaagcatagaggactactgaggcttctgaaaaatcacagcacggatatgcttaaccgtatagccagaaaggaaggttctttctgaggcacatggcgagtgtctgcttttaatgccaagagattggaagagtttaccaagaggatgccaaactctctttgggaagctgctcaagataaacacttggatgcctctacttcttgttgctgggcttmtacggggcaggctgcctgtctcccctctgctgggactcttcctggaagcctggcttcatcttctaatttggacaaggtgttgatttgaagccatctatctccgacaacaaggagggctccaggcatccctctcaccgcagccctgcagaaagctgacccattccctgatgggaatgccaggaatttccatcatttcctgtggggaacgactgagtaagcacagtgagaggctgtccttccagaggcaccttttccaaacatttctaagtgaggcacaggactgacactgggaggaaggtgaagggcaagggaacagtggaactcggtgctcctggtggggtttctttgaaatgtccaaaaccatttgcatcaagktaaggggagagtttcatttatgtggttttacaaatcctaattgagttggtatttctgaatttatttatttatttatttttgagacggagtttagctcttgtcgcccaggctggagtgcagtggcgcgatctcggctcactgcaacctccgcctcccgggttcaagtgattctcctgcctcagcctcctgagtagctgggactacaggcgccgccaccgagcccagctaacttttttgtatttttagtagagacggggttttatcctgttggccaggctggtcttgaactcctgaacttgggtgatccgcctgccttcgcctccaaaagtgcagggattacaggcgtagccaccacccctggcctctgatttaataagaattcggtgtcaaaatggcatgtgaggaactcagtgcaaaagagattctcaggctgacagagctggaaggggagtcacagagtagctctttatctggcccctgtatcctctgcttccaggcaggcaggtggagctcctaaacgccgagaaagggagttccttggctgtcactgctttttatataaactgaggagatttcataatctttatcaccatacatgataaccacaggctcctttggcaacaccatgcacctaggtttcccttcttcctgccaagaggacttctcactggttaggtcagaccctccttgccttgtctttcctgcccatcagtaaaaaaaagattcaacaccacattccatgtgattatgatctgttttaaaccatgtgaagagaaagtcgtgtgaaagaaaccattaaacgctccttcgtggatatctattatgtgccaggtgatttcccacccattagttcattgaattcccccagaaaccctttgaggtgggaattatatgtggtttacaggtgagagccaaagctcccaaggttggtagcatggccaatgttggagttaagcctgatttcaggcctcagtgttctttctgctctacttgtgactgggaagctcacagacacggccatactccagcatcccaaaatttttaatggaaaagcaagtcatcataaatgatcctgcactaaatcagcagctgttgatatggtcttatatttcacaatttcataatatgtgtcatattgaacactggagccctgaattttccaccatttaaagtataactcctcctccccactctctctggttttcattcacttatgaatcctggtagggctgtgggaaggagaagggtgggataatttgtttttccaacaattgggttgaaactgaatgtggtttgtttttatttttggaaaagttaaagaaaaaaaaaatctactcagctctgttttggttaagacagcatgaagacatttaggttgtttccagtgtttgttgttgaggggtagagtgggaaagagtttcccttttggtagcaactgcaagcaacttaagacagacagactctgaaacgtttcttaaaagatatgagttgaggccgggcgctgtggcttacgcctgtaatcccagcactttgggaggccgaggcgggtggatcacctgaggtcaggggttcgagattagcctgaccaatgtggagaaaccctgtctctactaaaaatacaaaattagctgagcgctgtggcacgcgcctgtaatcccatgtaatcccagcttctcggggaggctgaggcaggagaatcacttgaacctgggaggcggaggttgcagtgagccgagatcacgccactgaactccagcctgggcaacagagcgaaactccgtttcaaaaaaataaaaaaaagagatttgagctgttcatttggaggccccttgggaagaggaaagctgtccttgggccatggattttgagaaaaaacyacgatcctctgcaaagttgtgaactggagtgattctttttctctctcacgttctccctggggccctttgtgttcagtctacactgtgggcttgcgggggaggtggtgcccaggamgcaagtctttcgagtgagacagtcctgattcacatactggttttgtcttttactagctaagcctcattttgtgtatctgtgaaatgggtatgacaagtatatagtgtgtattctttggaggattgatattttattattgatattmtatatattgatattataaaaccataatatatatgggggccaggtatacagtaggtctgcactaaattgtggctattattaaactgctgactgctcccacccctcccactctgctctttcctctctcccaggtgctccaggtctccccttgtgaagcccagcagtcctcattctctctgatccttctcaccttattccctccctccctcaaaatcttactgccctccctcctatattctgtgccctgcagcagcctagtaatttgttcagggaattccaaaggagtctattttcttttcttctgttgttttccttcttcttcttctttttttttttttttttgtcacagggcctcactstgtcacccaggctggagtgcagtggtgccatcactgcagccttgacttctgggcttaggcgattctctcacctcagcctcccaagtagctgggaccacaagcacatgctaccactctaggccaatttttaaaaaaatttttttctgtagagatgggggtctcattatgtttcctaagctggtttcaaactcctggcctcaaatgaccatcgtggccccagcctcctaaagtgctgagattgcagatgtgaggcaccacgcctgaccaggagtctattttcttgaaggacattttaaaaagtggaaagggttggtggccatcagtaaagaataatacttttaaggaaggtagcatactgaggggttggagcagcttccatggagagctgacctgtcatcgtggctaagagaatgtatgctggagccagactgcctgggttcagtttccagctttgccagttacgagtgagtagccttgggcgacttagcctctctgtgcctgagcgtcctcctctagaatacagggataactgtattgtctgcctgtagggttcttgtgagaactaaatgagttaatactcagagtagtgccttgcacctagaatacgtacataatccatacaagatggatgtaatgtatgtattatgaaaagtagcacaaatgggcacaaggtggctacagtgtgtccaggctttgtttcagtgccttttttttagaggcaaagcagctttcccaggggccttctgtctactttccctgtcatctcattgaccaacgttgagtcacaagtccttttcgaaattagttatgtacaaagggaatgggctgtctctggttggcttggactaattayttggggaggaatggttggtgaggaattaagcacttyagccactattattacttgtaacaataatatctataatatataatgtaatatcattatatttcaaatgtaatactaagttatacaaaattattaaaaagcaacaatttatattattatttatataatctgatatactattatttataatttgtttcacttttaaaattattttatataaactttaaaaattcgatttattcataaaataattacaagtttacttcctaattgtaactttgctataaatgaagctacaaggtgctgttctagtttttgacagtttataaaaagagaagacatcaaaaacaagacatcagcataatagagaagtgaatgaatgaacaaaagtcattttgttttctggctcagtattctctatagtcttaagcagattttgaagaaaaaaaatttggaagaggaactaaaaaaaaaaagaaaaaaaatgagaaagttccaaatcttagtgaatacagctcttgccacatgaaacattgtgaaattggtctcctggtctgagtcatcactataaacgctttctgcttcttctgatattttatttttattcttttataggtttttgaatactgacatttggccgtgattgacacatgctcctctttttatacactctggtagttgtatttttttataagtgtgaatatttccatgcacagatcaatttctttcacatgttgcagaaggtgcaggaatttagacttgtcaggaaaacaagagaatcaaactcagaagtctgcaaaggttctggcagaaatccagactgcattcttattcccaaggcctgaagatgccctgtaatctctaatattygaaataacctttctaacatgtcgttctcattctgtgaaacgggaaaatataaaagtaaaattattgctgacatgtaagatctcaaaccttcaacctaagatcagtatttccacagcagtttaaatatgtaagaaataactatattgttccccttgttaaaagcatctggatgtttagttcgttgttttagagacaaggtcttactctgtcactcaagctagagttcagtggcatgatcatagctcactgcagccttgaactcctggactcaggtgattctcccacctcagcctcctgagtagctaggaatacaggcgtatatcaccatgcctggttaattaaaaaaaaattttttyttttttagagacagggtcttgctacattgcccaggctggtcttaaattcctggcctctggggtggtggctcacacctgtaatgccagcactttgggaggccaaagggagtgcatcacttgaggtcaggagtttgagaccaccctggccaacatggtgaaaccccatctctattaaaaacaaaaaaaaaattagccgggcatggtggtgggcccctgtcatcccagctgcttgggaggctgaggcaggagaattgcttgaacctgggagacggaggttgcagtgaaccaagattgcaccactgcactccagcctgggagacagagcgagactccgtctcaaaaaaaaaaaaaaaaaaaaatttcctggcctcaagtgatccacctaccttggccttccaaagtgttgggattactggtataagccattgcaccctgcctgataaaaaatatcaagatataatgattgtcccacctcatggtttacatagaagtcttatgattgaattgcttttggaaataattgaggggaaatatgaatacttataattctgatacacattcaccaaatgccttccatatgccatgaactgtggtacaaagatggataaaacmaaattcccacttgatcattttatttgccaacatcaatacttattaattcatcttgtttcaatttcttggaaaacmaaagttataaaaaaaaaatctttatggaagtaaaaattttctcctaaagatgtccatgctggcagtgaggcctcatcaaaggcttcccaaacagaktcatagagtatatgtagaatcagaagctcccactttgtgctgaaaatgataggaagtagggtgtcagggatccacatataaattctgcaggtgtgagtaaaaaaccagtaaaacagttgggggcgggggagtccattagcccagggaagaagtgagtgcaacattcatggaaatttggggaagagatgcaggccttcagcagttcccttttcttgggagatgtatgcacctcatgaggcttgttgagaaatagaagcaagcaggactcttgggaaagggtcattcttagtcctgcatatcaaagtgatgtgacgtttactacctatccataatgtgttggacaccatggacaataaagaggagagacgtgrccttttgcctctgggaatttcacatgtaataaaaaatagatttttcaaacagcggtgtatttgcataaaagaaaaatatcagccaacctacaaactgcctcctctctcacccgcagaatttccacaggcacaatagagggcactacgtgccagatgtactgtgagccctctcttccttctgtctggtggtgttctaggttcagtactggcaaagcttcaatggtttccaaataaggtcgggaacgcccctctgcccccacctctttccgtctgtgcaagtgaagagaacttgtatgaagtccctttcctttgtcctgcagaaaaggttggggatgaggtatgagaatctgttytgatataaactcgtaaaagaagtttggaaggcagcatccttccatgtgctgcgcacgccatcggccacagctgttactaaactgctgccatgtgaagccactctgctgattaatagcagctatgttcacttaaagcacaattcataaagagtgtaataatgtggttcagaaacctttgctattttttccactcttgatagattaaaatgtacctccgataaacagtgaagtccgtgaataagatctcagagggcccaaataaccttaagtaaatttgcaccgccagtctttaaattttcttgttatggaacgagggataacaagactacctatgtttcagggacattgtgaggatgaactaatgcaagtggagtgcttagcacaatgcctggcacttaaaaggtactccataaatgctcattatttactaagagagaaagacaaagatggggaattaaagtttaccaaaaaaaatgagttcagcatttcatttgtgtctctcatatgtatatgtgaatatacactctgtgtgtgtgtgtgtgtttggctatttaaagacttctgaattggaagcatggagatcagaattatagcctttcttttgctatgcattaactagctatgtgaattttgcaaaatgatataaactctctgggtctcaaataagcccttctgcaaaataaaagggttagggtagatgatttcaaaggtttctttaggctatacagtgttatgggtttgcatctatgtaatgtgattcaaggttcaagaatctattctgctactgcatttgattttttttttttttttttgagacggagtctcactctgtcgcccaggctggagtgcaatggtgcgatctcggctcactgcaasctcygcctaccgggtttaagcgattctcctgcctcagcctcccgagcagctgggactacaggcacatgacaccacaaccagataatttttgtatttttagtggagatggggtttcaccatattggccaggctggtctcgaactcctgacctcgtgatccacctgtctcggcctcccaaattgctggaattacaggtgtgaggcactgcgcccggcctgatttttaaaatatattattttttactcttccttattccaacaattcaaaataaatattttgtatctttattatggatctatcttcccaggtatctgatgtaaaatttagttggcaaaaattgtcagatggaaaacttgtattaattttgttcacaaatcttagtaatctcaagactgttggttttccatttggctgtaagttgttttcgtataactctatgagtattgaagcattttctaggcatgttttgaacgaactctgttccagatctctagactcaaacatggaagattcttttccttccaagcttcataaaagcagctaattattcaaatgcaggtgtctgtaaatttaatagaaagcataatgtttccattaacaatctgaagacagttggcagtttctctcaattcattaatctgtttacatttatcatatgaaatttttcttggtatttctcatgctaatgaaaaacatattggacaaaaaacataaacccaccagttaccawcagaggaaaatcactttagctgtgccccttcttaagaagatggcccattgggagctgtgactccctcatcttttctggttagttttcaagtattagaatccatatacacaaaagggtatccagtggtcctctgtgtcttggggcttttttccttcctccaagagagtggttctgtaaagtgggagcacatatatttaacaagcttgtaagtgagtcgttttcccagctgggaaatcatgaggtcagttctctcattctctgcctttttggaaatagttaacctcactttgaaaattgaagtcagcattagaatgaaggaaggaagaaaggaaggaaagagggcaggaaggaaggaaagaaggaatagaaagtgtattagagttttttattttctatttataattgcaaacacctagaaagggtgtattctgataaattgaaagtctttttcttttccttactgactrcttgggtggatataggtacacccacagctgaggagagctgaagattttggagttcctgaagtactaaaggagagaagagataggggaggggaggaaaacagggctggacacggtaggaagttctgcaggctttggggttggggataaggccatcttgttcagttctcaagggccagggacttaggaataamagagtgagcagctccttgcatacttataattccttactttgtaaaaaactgtatttttttcctgttatattgtaagttgaatgaggacagagatggtgtctgttttgttcaccactgtacctggaacaattcctcagctcaacatatatttgagaaaggaagagtaacaggtttgagtgcttagaatgtgctttgcactcaaggtgctttcttaaatcctaccaaagctcctcatctaataagcctgtccctgaaagtgcctgtgtgtgggctaaaaacattttctatagttagattctggggagacagagcctagaccccaaatcaagcagtaagtcacagcacacgggctgaaattcaggcaaagcaggaaacagagcacggatagtctgcgaaaggaaggagacaaactggagctgttgggagarggyggagggycacggaacttctagtgtcagraggaaaagattgaaggaagcacgtaactgctctgaaggtcctggaagtctctaactggggttggtctatgtaaccattttttaaaaattttttatttgttttttgttttttgagacaaggtctcaatctgtcgcccaggctggagtgcrgtggtgcgatctcagctcactgcaacctccacctcccgggttcaagtgattctcctgcctcagcctccctagtagctgggactacaggcaactgccactgtgcccagctaagttttttattttttattttttttgagacatggtctcactctgtccccaaggccggagtacaatggtgcaatctgtgcttgctgcaacctccacctcctgggttcaagcaattctcctgccgcccaagtggctgggactacaggtttgtgcccccacgcccggctaatgtttatattttttggtagagactgggttttgccatgttgcccaggctggtctcgaattcctgacctcaagtgatccacctgcttcagcctcccaaagtgctgggattacaggtgtgagccactgtgcccggccataggtaactatttactcctttagaaagactgggaaggtccttttgcttcaaaatagtacccttgcttgaatttattttattttttgcttaaaattaattaagataataggcctcttttgaagtataaatacactaggaaattttagaaatgatgatggttactaatagtcacctgtactttaaggtggattatttaatcaggttactttcttcctgtaaaatcaaactgaaatcagtgaattatttttaaragatttgtatttcagagagatgaaaggttcaaggaactttggatcttagcacctgagactgggaaataaaaatttcaagtgatggggcagaaactcagaaaggagaatgtgaaacacaaacttttcataataattttggctgggtgcagtggctcatgcctgtaatcccaacactttgggagtcagggtgggcggatcacttgaggtcaggagtctgagaccagcctggccaacattgtgaaaccctgtctctactaaaaatacaaaaattatccaggtgtggtggtgcatgcctgtaatcccagctactcgggaggctggggcacgagaattgcttgaacctgggaggcagaggttgcagtgagctgagatccaccactgcactccagtctgggtgagagtgacaccctttctcaaaaacaaaacaaaacataattaacaattttgtttaagtctgttcccatctcccctttcttcccagaaagcaggtaagaaggggtcaactttaaaaaagcttgagggagaatgtgatcccaggagaaacttcctgtaagtagaggtccccagtgtgatgggagcgtctagaacctgagctttggagagcccaagagtgtgtcacccccagccttrgtgctgagcacaccccactgggcttccccaaccaagttctgtgaacctgctaactctcaataggaataaggaatgagttcttttcatttgcctgagtcttgggccttacaatgagagttcgttggatgagattgaacagtatatgttgtgtacctgttgtattctggccctgatgctggaccctgggattgaattgctaagacatagcaccagtattgatggtgctcccagtctagccggggagaaaaaagatcaacgtatctctactgtagtttgagaaatgcttgaaaggaaatagaggatagaggagccagattctgaagttattaattctgcagaaagtggggggaaccagtgattcagagaaagcagtaaagagggatgactgtttaagggagaggcattaaaatgaggaagtccccagacagtcagtgggagaaagtgccttaaggctgaggaaacagaatgaaggtacaccagtagcaacgaggagcattagtgcctgtcccatggggaaatggactgcggcccattcaaaggagggaagcacatatacatacacccagctctgggatccattgttaagtgatagactgtcgcgagatgctgtgtttattagggatgctgaggaggctgcagaatagtgactcatgacttctgctctcaaggttgctacagccaagttaagaggacaaaagtgactcgcatggaacaatagcagataatacaagttagtgtatccgtggaggtttgtggtaaagatgagtccagacaagaggaaattgggaaaggaaaaggagaagcgcagcagcagtgcgggcctctagtgagcacacgcggacaggcagggattagctcagggtgtgggtggggatggagagaaagaaccaagaaagggaaccagtcaaaaaccttccttcctggagctcgggctgggggtggagctgtagggcatagggtgcaggtgcagggaatgggccaggctagtgagctagaaaacaaggcaaaagaatttcaacttgagttgattaaaatgcctggtctctgacagccttttcacggagcagtctaatttactacatggttttatgtgaaagaagagaaagtggaaattgggggctaggggaagagggctgtggctgtcaccggtgaataagctggtgatggacgtgtgacaacgggaatgaagtgagagagaagaaagatacgaaagacaagacacttttatctgtgactccgagatgtcgctggctctgactgtgtaactgatagcatctgtccactgagatccgaagggtcaggyggggagagaacagagccgagcccccgctgtgcagtctcagcgaactcccagcccccacaggaatccccacactcatgtttacgacacatgctgccacctttcattgcattgagatgattaagcaactaattatttttctctctgtgtgtgtgtggtttattactttcttgattttaattgatatagakcttctgaattagttggttctggccaaatgcaacaatttatagttgggtacagatgctaagcacttattactaagcaactatggcttcacccgtgtgccagtataataatggagacatttatgactggggggaaaatgaaacaataaaccaaggctaaaacaaaacattatgaaggtagtatgaaatgaaatgaaaatcaatgactactttgccaagggtaagtaaatcactttctagaggrgctgatgctgaaagcctgcagaggttggaarctttttctgggtacgaagcctaaggaggaggccagtgggaatggcaggatcaagtgaaccctctcggtttcagcctgggcttcttcagaacctgccaccctctccctgactcccccgcttctcctsagagaacagcyatcagaaaaccttgttcttccattgttgctgaggaaggcttgaatctgagctattacactttatgtttcttaataaactccagctggggagaaattaaactggggctaccctactttgcctttttcaagtaaaagaaacgtataggcttcaacatttcaacaattgtctgtcttggtagaatgcttataaatccatatccatgtggtcacatgctcaacctcatgataaaatggcaagcctgatcaaatgcatgtggtgtggggtgacctcacaggccaggtgggagtcctcctccgttatttttaataacagctttatagagatataatttatgtatcataaaattcacccatttaaggtgtaccagttcagtagttttttgcaaatccagaggtgtgcaactaccaccatcaatttagaacattttcatccatccagaaagaacccttgtatccattagcagtcacttttcatttccctccaactccctttcacccttccatcctcagccaccactaagctactttctggttctatggatttgcctgtgctgaacgtttcatatcactggaatcacataatatattgtcttttgtgtctggcttatgtcttcaagtttcatccatgttgtggcatgtagcagtacctcattttttaaaaatccggaataatattccgtgacatggacggaccacattttacttatccattttcatcarttggtaggcatttgggtagtttctactttgtggctattataaataatgctgctgtgaacttttgtgtgggcttgtgtttttaattctcttgggtatatacctaggagcrgaattgctgaggcacatgataactctgtgtttaatctttggaggaactgcctgagtgtatcccaaagtggttccaccacttcattattaagtatcctcattcccttcaccaaaaaagggaaaaagaccagcttgaattattttgctgtagtactgggatgatgtgtattaactaaaaagagatagaattggaatgacctaagagtggttttagatatgacgtcattcatttccatctcattatctgtacatctcaatacactttggtttgctaccatgtagcctggataacattcttattcttccacyttccctaagttcctgttatatgagtacagggcagtgctgtacctgagcttgctagtatggtagtcacaggctgcatgtggctactgagtactcraaaatgtggctacttgaaattgagatatgcagcaagtctcaactccaccctgaagttggaagacaagatgaaagaaaaaaaaatctcttagccgggtacagtgkctcacatctgtaatcctagtactttagtaggccaaggcaggagaattgctcaagttcaggaattcaagaccagtgtgggcaacatagtgaaatcccatctcaattaaaaaattaaaaaattagctggacatggtggtgtatgcctgtggtcctgtctactcaggaggctgaggcaggaggactgcttgagcccaggagtttgaggctgcagtgagctatgatcaggccactgccttccagcctgagcgacagagcaagacccagtctctaaaagataaaaattaaaatttttaaattttaaaaaagaaaacctctcataataattttgtgttgattatatgttgagataatagtgtttggtgtctattgggttaaataaaatatattattaaaaatcatttcacctgtttccttttaccttttaatattgctactagaaaaaattkaaattacacatgtggcttgcattatatttctattggacaatgctrttatagatgattttcaaggcatgttttttgaagtactggaaaaataaaattaatcagtctaaacatcctttgggtaaactcagccgattattagcaattattttcatcactgcagaaagaccaggaatccatttgttccttgagtgagaaggtgagtcaaagacatgccagtcagctttaagcagtgagccttgactgaccaaccaaccaaccttcattcaaagttagctcatcacacaaatagaaacgtgaccatgaagacattaaagcaaagtcctgtgataattggatacggcgcttctctgaccctccgagtgatatgtgcacctaataagggctggcctgagataatgcccatctatgttgtataacccaggagagacactgcagacccaaaaaggaaagaagagaggatgcacatagcagactgttgggggaggtwggtgactgggtcatccttcagctaatgtgtgaatattacttaattctagagagttggccctgggcttctcacgtgcctttttgttgcaggtcaatgttsaggttgtcaggaaagctatattgaaggcataacatacttagcaactgtcttttgtaaaacacacgraatgtactggtgtttttaatctcaaatgtctggacatgaggttactactagtgatatcatgattcaaaacagagracagacctgtattttggcagcatactcaggtaacataatttagcttgactaaagaccttaagacagataaattcctgcattctactccacggggaagaaaacctcttcccttggctgaggctttcactgatgcgtaaaatgaaacttgggctggggatgggggattcaaaaggtgacacaaagtccataaaaccttaggcgtgtagtaaatgaagaattctggtctttcttgtggcccattccgaatgaccacggaagaagaataaaatttaggtacgagctggcccatattttattcttggccgacagcagggggactccacgtatgtttgaatgaagtctcttgtcaaaaacgttcttactgttttactgtgctgcttacttgagctcacagcccgatcaaaatatccgagtctattttcttttttttttcttttttccttttttttcctctgatgagttcttaagtgaagaattcggcaagctaatcagtcatcactcatcacttggccattttaaaggaggaacctcagggcagtacccctgggaagtcctgagaggtcatgatggtttactggaaaacaagataattaagagacaacaatctgattagctaatatgtgtgttgaacacatgtattttgttggattcctagattggtttcagggttaaccgtatgagcaatcatctcctttgagatggtactaagcatccatttctctcctgtactctcatagctgagaggcatgggagaggcaggaaattctgtcttggccctggctctgcttccaccattgaagcttctggaaggtgcagaagggttagacacaggcattgcrgtgtgcatagggcacctgctgcaccagatgtgcaaagaaagctgcgctggggccccttgatgtggacctggctttagtagagttttagggtagacaaaaatggtcataaatgcccctcatatctccactcgggttttacatacgtcccaatgaggaaagctgtctgatttacagtgtcacttataaatccattccttacctgtgtgccasacattgtgcatgctaactcttccaagtggtcattcattcaaaagtagacttttctgatgggcagtgcttaactccaaagaagacacagcaaatgaccttccagacttatggcagattgacattgactggacagtaagttttgttggcatctttcaaatcttaaggagattttctctgcctgtacctaagagccatcctgtcctgaatcaatccagacccctcattagagtctgggtgatccagctgtagctacctagtttttcagatagcaagtaaaagttatctgagtgccaggtctggtggctcatgcatgtaatcccggctgctaaagaggccaaggagggaggatagcttgagtccaggagttcgagaccagcctggacaacacagggagacctctcccagmccccagtccccatctctacagaaaataaaaaaattagcctggaatggtggagcatgtccgtggtcccagctacttgaaaggctgaggtgggaagatcacttgagcctgggaggtcaaggctgcaatgaaccatgatcgtgccactgcactcagcctgggtgacagagcaagaccytgtctcaaaaagaagttatctgagtacctcctgtgcaaaatgagaagttcacgaggtgcagtggtggaccagaaatgaaactggggaaaatggcttcacgtgggagagagaagtcttgaggagtgatcatatagagacagaatctgtgatcctaaggtctggaagacgacagtttagatgaagaggtccaaaataacraggggcttttgaacaggtggtctgtccagtagtgggagaagctaccccatcagggggtcctcagctcctaggtcttgagctgccaccgattcacagaagcgaaggctgccttcagaaaacgggtctggacaaccaggaacagcagtttgccaatgcctgtggctagaggagagggccaacctggatcgttcaggtgcacttctcctctcccctcctcagcccacccacgtgtgttctcagttgtctgggtaagtcagcaagctcagctggggaaaagayagttgctctgaattaccagagatctgtgtctgttcaaacacaggattaaattcagtagcagttaaaatgatccttttgctttcttaacatgagaagcaaaaatatgtccttagtgagatgctccaagggtatgttaggaaatgagtgctagagtttccggtccctgatgaggtcctctgtgagcattcttaaaaatactcatggaaaacagtaaaagaactgcaaatgggacaaaatcagatcacaagtgagctgaacgtttttctctttttccaacttttggacttgaggtttatctaacattagagtcctcctcttgcctgaacttttctggcagggtatggccagtccctttgccacaaagaaaatgcagtgcttctggcgaaccacatctttgtgcagtcatagacatgtttatgtaactcagaagaacttatataaatttccarttctgcaaacttactgtaactgttggaaaactacctatatcctgccagtaagatacgccgtctcctcaatcgtaagcactmaacagtcaaggatccagcttttgttggcagtcactttgaaaaatgcgcaatgaaggaggcttgttttcattctactccgcttggtatagagtgctgcaaagagcaaaaagtcggaaacagctgagacattttgcaactcttgggactaggaagcccttcatggaagagtctagtgagcttcatttacacctcattttaagtaaataaacaccaggctttgtgggcatccatttcgcaactgctcatcaaactccaccaaaagatcgtttacagattttaacagttgtgtcctcttttcgcagagatgggggaagctctaatcaacatgatttgggtccacttttgggatatgtgtgctttgcttcaatactgtacttgccttcatcagctccagcatgtgacatggacattcttcaaggcagggttaaaaacatctgcagcctagaaatcagcagagctccccagggagggtgttaaatccagagtgtgctgatctgtttcctgtctttgttatgatttcttcactgtaactgaatctccttcggcgctgcagtgcctgggtactctgtgcagctgtgtcagcaggccgaggactgttggcttagggggctccgttcccatttacacggctcgcgtccataatcccagtcaggcctgttcgttcacagggtaagctgctccttgtcagcagatcggcaggcctcactgtgcagccatgctgttacatgtaatctaattaagattaattaagaggaagagcagttacctggctgcactgatccttgccaagagaaaaccctcgggaatgtgaacaaaccaccatcctaacaaaatgccgtgaaaatgctgcggaaaagcagtaaaatactgtctttaagacctgcgagccgagaagtgggagggctggcacttcaccaaggagacagagtacggggctcagggtcctcaggtatataggcattcctgcctggctcttccttaccacccggattttgtttttgctttctgggtagagctctgatgttgccaaacagcctgtgctcctcgtgaacaatctctccagactcaaaatagcgagcagccaaggggctgccactgcttgcggtccacagctcagtcagcgggctgctctttgttggagaagaaaatacgccttctggaaatcttacaggttacatcgtttattctcaaaacacaacatcagctgccagtgggtttccagtaagctgcaagagcatttaacccaaatgggtttgtgaccttcctaagcggaggtgtgggaaggctctagtgaagtgtggtgaacagatcgtyggtaacgcagaagtcatcctgctgttccggcactggaggcagagcccggccaactgagtatttctccagaggatgtttctgggcggcctttccctccttgtgtaaagcgtctcatctgtgtgggcctggtttatgagtacaagttgctcacggcacatgattggccctaactccccagtgctttctggcactcttaaaccagcgaggggtttgtgttttgtatgaaggttgtggaactagagacagcatagcaccaagaactatttttggtcttcattgagaactcagactgggcatagtagctacagtgtgcctgttgggttttaatgctgtcatgcctacctctgtgagacaggataaaggtggaagtcaaatgtttttctccattctttgcctaagatcaattcagaaaagtagtaaaatgctccatagaaggtactgcaagaccctcttaaaccagccagcctcccaccacgtgctttgtcctaccacctgagggctgacgtggtctgatttcataccctgcctgggttgtgcttgatacacttaastattgtgtcagttaaagtgtgctgtgctgagcactatttacaatagcaaaraactatttacaacccaaatgcccatgaatgggcaaagaaaatgtgcaaatgggcaaagaaaacgtgacacatatacaccacagaatactatgcagccgtaaaaaagaatgagatcatgtctttgcagggacatggacgaagctggaagccatcattctcagcaaamtaacacaggaacagaaaaccaaacactgcatgttctcactcataagtgggagttgaacaatgagaacacatggacacagggaggggaatgtcacacacccaggcctgtcaggggaggggggrgcaaagggagggggagcattaggacaaatacctaatgcatgcagggcctaaaacctagatratgggttgatgggtgcagcaaaccaccatggcacatgtataccyatgtaacaaacctgtacattctgcacatgtatcccagaacttaaagtaaaacactggctaacatggtgaaaccccgtctctactaaaaaatacaaaaaattagccaggcatggtggcgggcmcctgtagtcccagctactcaggaggttgaggcaggagaatggcrtgaacccgggaggcggagcttacagtgagctgagattgtgccactgcactccagcctgggtgacagagtgaaactctgtctcaaaaaaaaaaaaaaaaagcrtaaaataaaacaaaacaaaaataaataaagtatgctgtgctgtttttaccacattatagcatcacaatgcctttcatttctatttatctcccagtgtaactttccgcttagccacaatgcggccatggagcgggaagcagtgatcttyagccttgtttctctctggccttcttgaaggatgctgtgggtttgtgctaataaaggtggctctactggtgaggggatgggaatgtttctggcaggagtaaaatcagaagcatctgtgatcgtcaagtatgattttgtcaacatgtgtctttcattgaaaataaaactcaaaattctgagtataggaagccstttctagccagtccaaatggctcaacatttatttgttcagctatttattgagtatctgtcatatgccagactctgttttaggctctggaaatagttgtagaatgagacagaaaagacctgccctcatggcagatgrgaagacaggtaacaaactaatcgaaaaccgtcattcaaatagtgataaatgctagggagaggacaaggacaarggagcaatagagaggagtggctattctgttttatttatttttttggagacagagtctcacttttatctcccaggctggagtgcaatgacgtgatctcggctcactgcaacctccaccacctgggttcaagtgattctcctgcctcagcctcccaagtagtgggaattacaggcgcctgccaccacrtccagctaatttttgtatttttagtagagatggagtttcaccatgttggccaggctggtcttgaactcctgacctcaggtgattcacctgccttggcctcccaaagagctgggattacaggtgtgagccaccatgcccggctgatgagtggctgtgttagatagggtggttaggaaaggcctctgggaggaggtcatgtgggagtgggaacaagaacagagtgagggaggctgtgatttgggaagcgcatcgtagcctcatggtgtgtgggaagtaaaaagtccctcaggtggaaacagcatggaatgttctaggaatagaactaagccagctgtagctacaatagagtggcrgggagatggaggagatgacgtcaagaaatrgggctagaatatgttgagaccagggggcccatggggagggctttggagtctatggaaagccttcagagggctcaactagagaacggatatgtttcataacataacccactctgactgctgaagtgcggaagcagggagatctgtaggaggttgtgcctctagactaaatcagaggtgatggtgtctttgattagaacactrgtcstggagatgctgagaagtgataagatttgggatgtatgttagaggcagagctgaccaggcttgctgatgtggctatcagggaaagagtgagattaagggtgacttttaggtgcttgagctaagcatcttgctgaacaggggtacatttattgaagggaggagcagattttgaattttgtctttattatgtcaagtttgcgatgcttattatacattcagtggagcgtaattgcatgagtctggatctgagtcgagaagttgtggctgcacataaaaattaggagtctttagcatagagcccagggactggatgagaccacagaagaagagagtatagacagggaagataagggctgaggactgagccctggggcattatttaagttgagaagaggagrgagaacttagcatttagcgctgacaaatccaaatcctatgtgtctggttccctyactcccaaccacacagctctgtgttctgtctctgtctctgtgtctctctctstatctctgcatgtgggtagctgagggtggggatgctggtcaggggaaactggctgataattttcctcttcctcctccttcctcatccttctcattttccagtttctcttctctcttccttctccctctcatttctttcttgattaattcttaaattctagaaatccccaacctggccaggagtgcctcttgtccttgtgtctcctagcacgttcctatctttggtgatctccagaacaagccagtgacactgatcatacgatgctaatttagaattcttgcttgctaagttcactgacacatcttaagaggggaagttggactggggtggagaaagaagcaaaataaaccaccaaaccccagagacctctctttgttgttcagaagttctcctgtgtatcagaagatggacttggcagtgtgtaataaaagatgactctggtttcctgctggtttttaggatgatgtcttttggttacattctttcaacttgtaaaataktaacttccaattcccatgggggaggacccctgagtggtgctatttcagtgggacagaatcacagcattctttcccacctccttagctgccctgtgctccacttggaagcacctgtggccaaagctcataggcacttgtgtggcaggaagaacagatgtgaagttctgtggaaaagaaatacaacacaaattggcagaacacagtaacttaaaaaataaatctgaaagtcagtcctggagagcccatctttgggtcctggctttgattggaaagagttatggttttgtyggggtaatagcagctgatctttygtcctcccacagaatcctgccagagccaacacttggaagcacacagctaatgagaggatttcttccaaggttcttaaccaaatgctctttgatagtggtggttgtgaggcggaggaagatgcttctgctgaagagggggttcctagaagcagcaaccaaagcccttaaaagaatcaacagcgatcattatatagccaccatttagtgagagcttaccatatgccaggcactgtgctgtactccccgtttcatctcaattaattcttactatarcgctataagaaagtatcccattttatcartgaggaaactgaggcttaaggagattgtataaattgcccaaagttataggcccrtagatggtagaagtttgaaaccacatttgctttcagaacccaagctcttaatctaaatcatatattgagcacaaggtgcacaattcaagtttttttccaacacggtgtatgtgagtgatcattgatgccaatgaaatttattcactcaacaatatctattctgcttaacactagatcacrcatagttgggcatttaaagatatgtgacgctattctttttctcgagcaagttaccatctaggtatgagaaaaggcttcatctttaaaaaatagagaagagtttaaggctgtatgtgatgaagtgccacaaagttctctgaaatgccttccaggccttctccccattattttggatattattaataatacttggctcctctttacttacgtgaatttctgtaggcaccttgatttcctccccctggaaatggtcttttcttttctaccacatggccaggctgcaaattttccaaacttttacactctgcttcccttttaaatataagtttcaatttcaggtcatttctttttttttttgagatggagtctcgctttgttgtccaggctggagkgcagtggcgtgatctcgactcactgcaacctccgcctcccaggttccagcaattctcctgcctcaacctcctgagtagctgggactacagccacctgccaccactcctggctaatttttgtattttttagtagagacggggttttatcatatcatccaggctggtcttgaactcctgaccttgtgatccacccacctcggcctcccaaagtgctgggattacaggtatgagccaccgcgcctggcctcagatcatttctttgctcatgcatatgaatataggttgttagaagcagccaggccacatcataaatgctttgctgctttgaagtttcttccaccagataccccaaattttccaaacttttgggctccgcttcccttttaaatataagctctaatttcaggtcatttaggtggaaacgtccagcagtcagtaagatgtgaatctgaagttcataggaggggaaatggtcataacatatgtgagartgaaaaccatgagaatggatgtgatcactgacagggagcaggcaggaggcaggagcaggagtcaaggacagagccctggggcatgcctacttgaaagaggtgtatggaggtgtgtatgttcattcatatgctcacgcatatgaacataggctgttagaagcaaccaagccacatcttgaatgttttgctgcttagtagtttcttccaccagataccctaaatcatcactcttaagtgcaaagttctacagatccctaaagcaggggcacagtgtggccagactctttgctaaagcatggaaaaagtggcctttactccagttcccaataaattccttatttgcatctgagacctcctcagcctggccttcactgtccacatcactatcagcattttggtcacaaygatttaacaagtctataggaagttccaaattgtccttcatcttgctgtcttcttctgagccctccacactcctccaacctctgcccattacccagttccaaagctactttgatattttcagatatctttgtagcaatgccctactcctcagtaccaattttctgtattagttcttgcactactataaagaaatacctgagactaggtaatttataaagaaaagaggtttaattggctcacagttctgcaggctgtacaggaagcatagcagcttcttctagggaagtctcaggaaacttaaaatcatggtagaaggtgaaggggaagcaggcacatcttaatggccagagcaggaggaaggtgggggagatgccacacacttgtaaaccaccagatctcagaagaactcactcacaatacagtgccaaagagggttagtgctaaaccatccatgagagctctgcccttatgatccagtcactcctcccagcaggccccccctcaacattggggattacaaatcgacatgagatttggcggagacacagatcccaaaccttaccaatgacccagtgaaataggcggaaaagacattttccgagagctggaaggagaaccaaaagagtgtggtgttatggaagccgagagagttttaaaaaagaaagtccttgtgttttcatcagtaactttgttgtgtatcagtgttttcccttyatgtaacttaaatgtccactaatgcaagtgaaggcaatctatgcctaatttcttcactaaatattctactaataaatgatttactgacaaaatgaaattatataactgaaaaggtttaaaaatgataagaaatatcccaatggaagctgttttttaaataatgttattactgtcagtaacaaaattatgatgacacagrtccaacaccttttaaaagagaggaggtaaaaaggagagttggatatgaagaatctcagactgcagtgcagctctgagaaagtctcagccaggtacatgggtgcccgggagcagagattgcctgtyagaagggccccatgagggcagaagtgacctggctctcgtgtccctgccatgatcagtcattggctgtaagcagactccgcccggactgtgtggcctcggcaggaatcayggtggcagattgagaggggcagtgctggaggctgtcagctggctaggcatcccttattgctgaatagcttactgagggcgtacctccgtggcygcctagtgagtctctttctgtaaaagcagttcagtgtgggagtccctgagagagagtttgctgcagaagcttcattacagtgacctatgaagcaactgacagctttgcagagtttgtttccattatgttgcaggtctccttcaaaacaagttttggcacttttgatgccaactagagtgtaaactatattttagagcgactagtttagagtgtaaacaacagtaagtggagcagatttcctctcaacttagcctcaaagataacctctcacactagagttatttttttacctaatacttctttttttcctggttactgaaatcatacacacttactataacaatctgtagaaatgtgtaacttagagagtaaaagtcttctataatattctatcccaaaatataatcattgttttaaaaaggtatgtattctaccttaaagtccacttttattgttatattttactataacattctaattataatattttattataatttataggtttcagtatgatttcaatgaaagatgaattctggcaaacagtatttattcccctttccccgctgggtgtcatttctttgggaatagaaaaatgaccttgttttgtgtatctagccaacaattctttttaatatttgtgagtataccaaatgtacaatattccttcaactgaagtaactttttaaaagaaactagaatttattcctccgtatgctttattttcatgaggtttgggtacagtatagtaaatttaaaaatcttttgaactctttaaaatggtctttgtacctatataatagaaaaggatctgttcaaaaaaattcttgccacaaattccttttgatcattttcatttacttaattgctctaatttatgcttatttttgtccactgacaacctaattggcctcacagacttctcattttattcaaagtccaccagcagttacttcttttgaataccacctcccctttggactccacgggaatttggacaataattgtgatgggtttggcaggggcttgggggttgggctgctcatatattatgaaaagccttagtagagaaaaattacatttcaagttaatttgtttttatataacagagtctgggtctaagctttccttcacmacatacccattgagggttttaggaagtcaacatgtttacactgtatcttaagtcaagggtcctgtttttatacagggtttgccaaaccaagtttactacagtggtgttctgccagcacaaagattacaggatcagactttagcgaacgctygtttgccagagtcatgttttatctattcaaccccaaccaccctgattcattttggaaagtctactctgtttatcccacgatgatgacaaagtggttaaaaaagaagattactacaaaaagtgatattttcaagagagacacaaaggcactgatacagacaggctttagagaaagacaaactttgtggtaccacttgggtatttgaaagcagcacaattattttttttcagtcacagggrgacaacattttcccattgaactttttggatacgtattttcacacacactgtkcccaaaagtcagattctctcctccatcccacccctaacccaaattacaatttaatttgactgctggctgtttttgaaaagaattctgaaagtgattgaccgctaccaaagatgaagattgtagtttttctcctgatatgattatattcttgatatattcttgckgtaggggacaaaaagtgatcaatagctttatgcttagtaaaatcagagaggacaggacttgcaatttaatggttttacctttatgtttactacatattagcaaagtatctaagctctggaaactgtgtctccctgtaatgttgtcaagtatatgtggagaggtgaattttacagaaggagaaactgggattatccyatcccrctttttacagtggctcataaagagcaatgtactagattctcagcacacacaggttatggattgctgtttttcctggagtgcctgtatggtggatctgtttcacttggtctggcatgggagtcaaattctatttgcaaagcccgactgggtggcctctgctcagcacgccaggcaagagctgtgggtgaatttccagaagtggcaggctgctcccctctccctctacctccttgagaaacagaggaagttcatgctgccacaggggaagtggaagggatgtccarttgcctctgaggaagtcatatcctgctcaagaagcaagatctcttcccatgcgggaaggtgccactgacacagtatctcttagatggcataatcatagatgacctgaattgtgtgtagaaaagggagtttactggaagatactatttttgttggttaacaaagggctgtaagccaagtaaagcctgaatgtatgtgtcatctgcatagtgtgaagaggctttcatagggagagattccacgtgtgactatctgacctaaaggccatgtaattcccatggtgaagtccctccctccaagcacaggagccagaggagcccttaaacagccatcctcttggacgtggaaagataaacactataaatgatcaaggataactgttcaggtggtactgaccactctaggtaaactgttaagagttgaacatagaattttttcaaaagcctgttgatgtatttatgtgcctcaggacctttaaattctgaagataaatggatagaatgattcaggatgatttagggagaaggcagatggaaaatgggaatgaaatacatgcctttttgtttttaggggtgctcagttataaatatgaaaggctgagaaaatgctaattgtacagtaagatcaactggacttgttttaataagacaataatttgaaattagtaaactattttatacaaatagtgctaaaactttggaaggtcctcaacctcctgggctcgagcaattctcccacctcagcctcccaggtgtgtgctcccatgcctggctacttaaacaaaaaaaaaaaattttttttttttttttttacagagatagggtcttgctatgttgcccaggctggtcttgaacttctgggctcaagtaatcctcctgcttyggcctcccaaagtgctgggattacagrtatgagacactgcgcctggcccaaagatgatttttatagtaaaaagttaaatatcataacaatctggcagttcctcaaaattgagtataaaattttcatatgacccagcagtttcactcttaggggtgtgtgtttgtgtgtgtgtatgtaygtatgtacatatgcacacgtgcacacacacacacatatatatatacaccaaggagaaattaaaacatatccacataaaaacttgtacatcaatgttcataacagcattattcataagagtgaaaaagtgaaagcaacccaaatgtctaccaactggtaaatgataaataaaatgtagaatatacatacagtggagtattagtcataaaaaaggcagtatttgtacatgctgcaacatgggtgaaccttaaaactcttatgctgagtgaaagaagccaggcacaaaaggccacatattatgattccatttatatgaagtgttcagaayaggcaaatctgtagggacaaaaagtagattaggctgggcgcagtgactcatgcctgtaatccctacactttgggaggctgaggcaggcagatcacttgagctcaggagttcgagaccagcctgggcaacatggtgaaaccccctctctacaaaaaataaaaaattagccgggtgtggttgtgcacacctgtaatcccagctactcaggaagctgaggcaaaggaatcacttgagcccaggtggygaaggttgcagtgagccaagattgcaccactgcaatccagcctgagtgacaggagtaaaaccttgtctcaaaaaaaaaaaaaaaaaaagtggattagtggttttctgggggctggcagaggtatgggatttatttttggtgtgatgaaaatattctaaaattggaaaattggttatagtgttgggtatacaagtctttgaatatactaaaaaccattgaattgtatactttaaatgggcatattgtacggtgtggggattataccttgataaactgttgtgtttaaaaacrtaacagataaccgtcagatctgccccatcagaatttcataatttggcataattggggctcaaacaaatgaggccttgtgttgcaaatataggcaacatctgcaagttaccaggagcaaagttgygaaatggtagctgtaacctaggagagatggataatgatttttccaggatgctctgaaatccacactaaatggaatctgctggtgcatactttatgccacattgaaagaacaagtgcatgttattgcactctctggcccacatttcagtcagttctccgtatgaaaattactgccctggtcagatctgattactttattatatgttcaccccagagtgccaaacttcatgtgggaaaaccattttcaacaggaagaaatgaactgtgaatrtcctaagaagagggcaacaagtcatatttgaccttcrtttaaaaataatacgtaaggaaaaatttcttaataaatagacatagcttaaaacatgaaacgtaaaaaaccaagcatgtagtagtttcctagatctggaaaagcactgcacacgtcagtcatgcatacccttcgaaactgcaattactataggtttgagaccccatgggatgattggaggatattgtttctgacaacttaacatttcttgccttaagataatatggaaatatcacgtcaatcccatttgtttgcagatacatcttttttaaaataaaagttgttttcacattggggttagttttcttgttttcgygcctatattttaacctattttaaccttttctctcccctccctacctcacccccacctccaaaaaattaaactctttctccataaacaaagctgagagtgtcaggattggaagccacttctgaggataccatttcaaaattatattaatgtcatgaaaactgcttcttatattttacattgaaatgtgaatatgggcttgtattttctatttccatggttattcacagtactgatggtatagaatttttaggtttaacttcagttatgtcattggttttacctgccacagcattttcactggatcagcccccagatatggattctagactctatcccagtgatctccaaagtatggtataaacatagaataaacaaaaataaacatttgtctattttttatctgaaaaagagacagttaatttataatactattgaatgtatcaatcatcatagtgtatgtttataatttataaataaatatgtgcattccgaaggatacttgctcatacttgtttctgatgaggttgtttcatggaaaagtttggagatctcttgtgttagtccattcttgcattgctgtaaagaaatacctgaggctgggtaatttataaataaaagaggtttaattggctcatggttgtaccggctgtacaggaagcatggcaccgacaacactcggctcctggagaggcctcagggagcttttacgrtcatggcagaaggtgaagggagagtaggcaygtcatatggtgaaagcaggagcaagatagagagtggggaggagactccacacacttttaaatgaccagatctcatgagaactcactatcaagaagaccaagaagaacaataacaccaagtcattcagagatccacccccatgatccaaacacctcctaccaggccccacctycaccactggggactacatttcaacatgagatttgggtggggacaaatatsctaactatatcagcacgttcctttattctttgctttctccttcccatgctaacagaacccttctccttaggctccagccacatggtagatttcctccgattcttgctccccttaccctacaccatgagacggaggggatgcaggcacatatctaaagccaagagtaccttaaagttcacaaacaaacacatgttcccatgaaaacctgaacagacaaccacacttccagaaccaactatttttaaccaccatttaaatagaaggccaaagaagatacttaaacaaaaagttaaagtcgtttcactttactaaccaaaagacatgaaagtgagatacaagataattgagcttccttcagatttgacctttggtttctttcagccatgaggaaatggatgtatcaatttttccagatttggagattttgaacaataactccaatstgaaaataccaaaagtcagctaaatatccctcaagtacatactatgttttagatactgtgggaaaatcagaaaggtatgtgtttttaagagcttacaaagcaattggaaagagaatatatacatacagaatatgtatttttcatgtaccatataattccgtattaactaatatatgtatagaaaattaatgaacagtcaggattctatataagacagtcttgacacatyagtgaaaagagatgactcctgctagcaggtggctggaccagatgaacactgcagtgacctgcagcttttattttattttatttatttttttgagacagagtctcgctctgtcgcccaggctggagtgcagtggcgggatctcggctcactgcaagctccacctcccgggttcacgccattctcctgcctcagcctcctgagtagctgggactacaggcgcgtgccgccacgcccgaccaattttttgtgtttttaatagagacagggtttcaccgtgttagccaggatggtctcgatctccttacctcgtgatccgcctgccttggcctcccaaagtactgggattacaggcgtgagccactgcgcccggctgacttgcagcttttagacagatgcctgtaggattgtgcagaagagctggtagaaaggttctaggagtttggagaaagaaggggtcaccctgggctggaatgctgagagtttcataggcaagggaaacttgaactcacatagaagcagcagtatgtgtagagagcaatgggcagaaatacacagaactcaacagctgaaccttccttactgagggggctaagtctgagcttggtgctacrcatcagcatgggttttctcccttgggcctcccaacagctccactgggccaggcttcgctgtttacccaaggtcatgccagtcaagtcccagaggcaggcttgggagagaaatcagggctgaggagaaagattcagatgccctctaaatagacatgacaatcaaacttgaatttataagtcatctctgaaggaaatattgtggagatggaaaatcggagagccacagtagcctttatttcacacctctgtaacttcgtcttttctctctgtgtcattttctgactcttactcctcaaacatccccagcattaaggaatacaacatcggatacaggctcaggaatcccacccataaccttctcagtccccactgacagtcatcagaagckgtgtgtgtgtgtgtgtgtgtgtgtgtgtgtgtgtgtgtgtgtgtgtgtgtagagagagagagtctcactctgtcacccaggctagagtgtagtagcatgatcacggctcactgcagcctcaagctcccaggctgaggtgattctcccacctcagcctcccaagtagctgggattgcaggcaagtgccaccacacctggctaattttttgtattttttttgtagaggcagggttttgccatgttgcccaggctggtctcaaactcctgagctcaagcgatctgcccgtcttggcctcccagagagctgggattacaggcgtgagtccacactgtgcctggtcagtttcctgttgaattgtgtacagctacaactatataaagaaaaacattgttagtatttgtcctaatgtaaatttttattggggcatattcactagtaaaaggaaaatatgagcatgaggtagaatagacaccattgttgtacaagcatatggacagcgtcctcgtcagatccatcgccgtgaatgccccaatctagagtctgtacgctgcacagtacaaggctgtgtctgcgttgcgcaccattatgtactcagcatcacatagtgtgatgaacagtttgaaagagcactaaatgattaagcccagtgtttctcaaagtgtgttccttgaagatagtttccaaagatggtccttataaaagtgtcccttgagctcacataagctgcagagcatagttttctatgaagacgtacagtccgtatagcactttatttttttattattatttatttatttattttttgagacagagtctcgctctgtcgcccaggctggagtgcagtggcrcaatctcggctcactgcaagctccgcctcccgggttcacgccattctcctgcctcagcctccccagcagctgggactacaggcrcacgccrccacgcccgactaatttttgtatttttagtagagacagggtttcactgtgttagccaggatggtctccatctcctggccttgtgatccrcccrcctcggcctcccaaagtgctgggattacaggcgtgagccaccacgcccggcctgcatagccctttaaaactaagccccgctgtagggagcctatttatatctccgtctaacatgacatttccccaaatcatctgttattgtgagtatttgaaactttccaaaactcaggtatcctataggtatgatggggctgacaaaatctgtttatctaactcaaatgttggaagaatccaatgcattaacatatgtgaaaatgcttcaagtataactctatacaaatgtaaggtattagtactatttcctaattgcagttggccctctgaatcagtggacgaggaacccatggatacagaagactgataagggacttgagcatctgtggactttggcatcccagggcatcctggaatccgtcctgcacagatactgagggatgactgtattgttgctatatgtgctattctccaaactcatgaattttttcggctttgttgaggtataattcacaaataaaattgtacatatttaaagtatacaatgtgctgatttatgtatacaatgtgaaatggttaccataaatattaacacatttatcccttcacatagttacctgtgtatgtgtgtgtgtgtgtgtgtgtatgtgtgtgtgtgtgtgttgagaacatttcagacctacttctttagcaaatttcaagtatatactatagtattattaactacagttaccatgctatacattattagatcctccgaacttattcatcttatcactgaaagtttgtacccctttaaccagcayctccccattccccatcccatgtcgcaactactgttctactttctgtttctgtaaggtgttttttttttaaagattccacatatggtgataccatacaatattcgtcttctctgtctggcttacttcacttagcataatatcctccagtttcatccatgttgtcacaaatagcagaatttccttctttcttatggctgaataatattccagtgtgtgtgtgtgtgcattcatacacacaacatttcatttacccacgaatgtgtcaatggacatttagattgtttctgtatcttagctattgtaaataatgctgcaatgaacatgggagtgcagatacctctttaagatactgattttgtttcctttggatatatacccagaagtgaaattgctggatcatatggtagttctgtttttactttttttgcagatgcttcatattattttccataatgactgcaccaaattgcatttcctccaacaatgtgtaaggttttttcttttctctacacccttgacgacatttgttatctcctgtcatttttataacagccattctaacatgtgtgaggtaacatttcattgtggttttggttccaaatagatgaattttatgatatgtaaattatatttcaataaccttatttttaaaattttaaaataaattttttaaaatcttattttaaaaatacattggaaaagtgcaaaaaaaaaaaaagaatctctgcttctggagaccataaggtttagaaaatttggtttgttgtgtatattagttagggtataattctctctgtgtgtgttccaggtttctctctcttgctggcctagatacctctttccattcatttgttcattggtttattcattcattcatctgaccagtactgagcaccaaagatcgtatatcattttggttggtacaggcatgtggacagtgactctgaataaagcaaagactattttaaggagttcacagttttgagaaaaggcagacctggaaacaagtcactcactataaaacagtgaggaatataccattgtgaaagtttgaacaaggaacaatgggatgaagttgatttctcagagcaaggaaacttgcctcatctacctgggaagatcttgcckcatcttcttctacttttagaggaaggcagagagagaagtttgagtgagatcttgaaagtttcccaggtagatgaggcatgttaagggcagccacttcctctccaaaatcattatttctgcttcctttatttattattccttccttttagttgcccctttaactcctcaccatcatggcctcgtctcctaactttagctctggtcttctttcttctgtggcttttgagcatttgtaaatgtagggtaattgggactttccaaaatgagtattttttttttttttttttgagacaaggtcttattctgtcgcccaggctgcaatgcagtggtgtgatcactgctcactgtagccttgacctcaagtgaccctcccttctcagcttcccaagtagctgggactacaggcatgtgccaccatgcctggctaactttttaattatttgtagcaatgggtcccactgtgttgtccagtctggtcttgaactcctggcctcaagtgatctcctgccttggcctcccaaagtactgggattgcaggtgtgaaccacagcacccagctggaatgaggatttttgatcttccattgtatctctaatatgttgtctttttttattaagtgcagctaaacttgacttataaatctttaaattattgaaattaaaatgacaaatacttcaggttttagtatgtttaaaattrataaatattaagagttggcagaaatatagagtatattaaaatttggaatgaattttagctccatgatatggttctactttatatttgaggctaagctgtcaacttcgaagataagagaaaaagtgaatttttcttctctcaggctgggttgtaatagcatgaggtttatgctggcactttgactttacaacatctgaaatcactcatatctacttttttatatccaatagtatctctgtatgaccaaattaattccttttttacattttattcaagaatatggcttttacattacaacctagcacatagtcatcttactccttttataattttttataggttaaactcaaaatatattcaggagttcagagctgaattataattgactataaacacgtaacctatgtatgtagcctataaatttctaaaaagtctatttctttggaactatgtgtgctatgagatgacagatcaaagctttaaatcctgttttcccragtctagtttattagtttgtcagagaaatattaggaatttttttacacaatttgtagctcagtttgttaaatgaactgatagatgcgacaaagcttcgaagaaaagtggcacctgggagaggctcacttaacgcaacctattgtcattagtattccttctccaaagacttttcatttaactcaaatattgtcatgtgaagtatcaccatccgggttgactcaagccacttatccaaatcagaataaaactttttagccctggagtcatttcctgtcctttctaatcgtacttaggaatatcgtaaagagacataactcaaccagccatcagctgagcagatgactgcaagttcgtcattctgtgtgtctgcacataccccaccagctcagccaacaccgacattagagctatgatagaaaggagactatggaaacagacttgaaaaaaaaaatccattttaagtggagagtcatgggacaggtcacagtgggcaggkgaaagaattttagagaaatgaaaatgctgtgcaggtggtcaccctgaagctaatttaacttgggtcatctgtgatctgttccagctgtgaacatgtgcctggtggcccagygtcccagatgttctttctcggtctttatgttgtatagcccataaaattaaaacrggattggagtttaattctaggccttcacagtcctatcatcagtgttcagtggagctattttctgaaaatgtagggtcctggtaagagaggccttggttgggccaagacagcctactgtcccctgtaatttttcctcaatgacttctgcttccatctctccactgcctccttcataccagtctccaattttattctgctcagagaattgcttctcaccttggaagctcctagctcatgtaattgtgtgttatgaactagacatttctgaaaagcacaagtattgtgctactcatcgttttatggcaaaatcaattaattaacagatattttttgagcaggtgttaagtatttcaatattggtaactctaccagccatgggaggtatacaaagaaaatgtaaaacctggaccttggcctcgaaacttggcagctggtggtagaggaaaggagaacacacagaagatcatcagagagcaatacccaacccttccatcactgtcggggaaagccatgcacccccttgtgatgtctccttctgcttgtgacttttggttcaggtgactcccagatagattggaagtaaggcctgcaaatcctaattaaacacagaggagatctgtgtaatatctacaccaaatctacctttataacataaaactccaaatctaaattccagaaagccacccctgtttccccccccccyttttttttttgagatggagtctcgctgttgtcacctgggctggagtgcaatggcatgatctctgctcactgcaacctccacctcccagattccaggaaatctcctgcctcagcctccggaccatctgggattaattacatgtacccgccaccacacctggctaattttcatatttttattagagacggggtttcaccatgttggtcaggctggcctcaaacgtgtgagctcaagtgatccacccaccttggccttccaaagtgttgggattacaggcgtgagccactgcgcctggccccgctttgccctttattgcctgcaaaataaaaagacctctttctctagctagttccctggcagagtggggcctatgtgagcagaattttaatcactaactagagctctttcacttgaccaagaagcaagaagcaaagagttgatggctaactggaagttacttgttttgtagcaataatgtggctgacatactatgcccattagtcacagattctgacttaaattctctccagagacaactttcatacacatggaagatgaaaggggaaaggtgaacrgttattaaggatacctgactgccagaaatgccgtctgagtcttttaccatccaaatttctgttgtcatcagaaataagagtgtaaagttccaggaaattcttcaggctgacccatcaatataatagttattatctttctacactttttgcattttgaaaacaaatgaacttcttcaacttatgtgtaaaaggctactcaatataatgttaatattaagatttgggatatccaagattttctaaaagtaggtagagttctgaatgctttgtccacctctggatagtcagaaaaagccagcgtataaaaagagacttcaaatgtgtattagccagatagagagagagagagatttggatttaacttctgatatggtttggctctgtgtccccacccaaatctcatcttgaattataatccccataatccccacatgtcaagggtgggaccagstggaggtaattgaatcatgggggcggtttccccatgctgttcttgtgataatgagtgcatctcacgagatctggtggttttataagcatctggcatttcccctgcttggactcactccatcctgccacctttgaagaaggtgcctgcctcttctttgccttctgccatgattgtaagtttcctgaggcctccccagcaatgtggaactgtgagtcaattaaacctctttcctttataaattacccagtcttggatatttcttcatagcagtgtgagaatggactaatacaacttcttatccttcttcaaattggaaggtcaagtcagttacatttttgtgaatattaataatgtgcaagagagtgtgctcggtgccagaatctttaataaactcagagtccagctaggaaagtataaatgaaaagaattaaaatatcagaatagttgctaaataaacaccagaaagctgctggtcaaagtcaggaaagttgttgtgataacaggcaaggctgaaaggatgcatattccaagctgagcaaatgttgtgagcatggcctcgaggtggggcacttytgggaatggcaagtggtttggttcaatggaaggatatgtggctagccaggatgagaaatggagcaggaaaaagtggtttaggctaaaatcagaggggtgcattgggaatratgttttcattaaaagctatttgaaggagtctgtaaggaaaaaaagagccactgtatgttcagctggggagagtgagcttcaaatatgtgcttttgggaagatgattttgatggcactatgaccagggaagtgattggagagaggagatatctcaggcaggaatttgagtttgacagtgcattgcatcactccaggcaggagttactggcaacctgagctgatgaggacagtgacaaagaactgtcagaaggaagagtggccaagagaggttttgcagaggaagaatgggccagatgtgactgcttatgcaatatagtaatggaaacatggactccragccagatctagttcatatggaagcaaaacattagccccagtgatagagttgtcatgaaaatactgtgtgctgcmtttatctttctggattgttatcagtcattattactttgtatttttgaaaaatacctgcaattttaaacattgtgtatcttcttttgtttcttgcattttcaaatgatgctttgaaccactttttaattgttggcatatgcacttactgtattttattgtaagtataaagcgtatatcctaataattctccttcctttttctcagacaatgagaatgacttaatggtttgtggataatatttcagtagtgttacatttttagtaataatagcaatgacctcatataagcgtaatgactcacctagggtatgagtatgatttttatagtagactttgcagggtatttggctcttctcttctcttttctctctcttaattatgtttggaagattataagctgctacaagcaartctcttcttagccttttttttttttttttttgaggcagggtctcactttgtcgcccaggctggggtgcagtggtgcattcttggctcactgcagtctcaacctactgggctcaagcgatcctcttgccttagcctcccaagtagctgggattacaggcacacaccaccttgtgaggctaatttctgtactttttgtagagacagggtttcgccatgttccccaggctggtctcgaactcctgagtccacccagcttggctttccaaagtgctgggattacaggtgtgagccactgtgctgggcctctttttagccttttaataagcagggcagactctggattcaggatgcgatgatcaggtctggcttaggaagccttttttgtcttctgtgagaaacaactcctggagctgattggcttttgggctgagtaacagcttgatgtcagggcctcctggggaatgcaacatctcctaagaaaccaatggtctagttgccacaggagtctcagagaaaaaactggcagtagtactcaaatagccttcagactatctgaggtttctygggacttaccagtcctgcctcagatgaagccccaggcatccttggtttgggggtagaaaactaaagggcagcctttctaaagtaacaactttccaagcgcaaggatggaggtactttcccctagggtggagcaaaattgatagcaagtgctcaaccattttaatgatatgacttgatccttttttccctcataggaaaaaaatgtaagctcagactgaaataagtgctgcttcttattttcagcctccgattggtgtggttcagcatgttaacttgtttgaaggactaccatggggaaacagtccatgaacttagagaaattaggcagaactgaatgttaaatttgaaaatgatctcaagatagtcagttctgctgtaatccaatgtatttccttcctaacaatcatcacactgtgcaaaattatgccatgaaagccacagacttacaggaaaggtggagtaacgggcacaatactccaaaacttcctcartgrcacatgtgaaaaaagagacaagaacctaataaaactgtcagcacagtttaatgcatgttaactggctaagaaatacataaatacaaaataaatatggcactttaccttgaaaggtttgcttggggaggtgagcgcyggaagggttgcagcttgtgagattttgtgaaggggtgcaaggaaggttgtccaaaatcagatagacagttataatatcagatgtggatgggtgtggctcgcagcacatggtgaactgagggagctggtagattattgaggtgtgtgcatgtgtattttgtggattagtccagctggaagaagttttctgcattcacttagtgtttttcacaaaagaaatcacgtataagcaaaaatgcaaaattcatgatacacccaaatttttccctaatgtatcaattaggttggaatgaatttggatacagcagaactgattgcagtcttacccccttagtttttrtataaagaaattgagacccagtcagactaaatgaagttttgtagccaggttagtggctgagctgaggatggattcctagacatcggttccttttctagcgggagtgtccaccatgctctgtttcctctttcgctgtattttataaattcctgctatttgctgatgataatattgttttagtacttaaatattttaaygwaggtctcagagctagatccttaatgtagataccagaacttaatatttggaatccaataaatgtttgttagttaatgaatgaattaattaatgaaggtggtgaatggacataatcaagtccaggttcactatggatccagttccagacctaagagtgtagacaaaaagatggagaagatgtgatggcrtatttaaagttaatgacagcagtgatctttccatgttctattcaagccttcttgggttggattttagtaaaatgatttagagtgtggggggctttgtgacagaccacaggcaagttatttaacctctctagataatatgggatttacctctttgggtttttgtaagagttaggggagatatacatatataaaatctccttagcacagtgcctggcacatggcaagagttcaataagtggctacacttattattactactgctgctgctactaccacttctactgccgctactgctttcccaacatactatgtgttgaagggaaccgaggaccagtaaatgtgggggaaggagccctggcactcctcctaggcactggcccagttttcttaactgcttattgctggacctctccacccagctgtgtaacaggacttcaaactcaacatgtcacactcattaccttgcttccagtgtgctcctcctcatgcattcaccacattaatgccatccctatttgcccagactaaacacctcagtcatcctttacttggctgtcttcttccacctccgcagtctataggttattcattcattcaggtctggttttattgataaccagttgggtctcaggcatctgccaacgtgcttcaagaaataaacctgaatgagacatgatccttgtcctgaggagtctttcaatataaggcagagatgcaaactatgaagactctgatccaaaccccacatcagtaaccaatcattataaaatgtgtataggttgggcgtggcagctcacacttgtaatcccagcactttaggaggccagggtgcaaggattgcttgagcccaggagttcaagaccagcccgggcaatataacaagacctcgtctctaccaaaggaaaaaaaaaaaaaattagctgagtgtggtggcacttacctatagtcagtcccagctacttgagaggctgaggtgggaggattgcttgagcccaggaggtcaaggctgtggtgagccttgatcataccactgcactccagcctgggcaacagagtaagaaaaaaataaataaaataaaataaaatgtgtgggccagtgcaagaggccacagccatagttcctatatgttgccactcacttaaatgcaaagtggacattgattttacaagtaaaattgataagtataatcatggagtcattctatatttccaaaattgtggccccttgggttaacaaaatatatttgtttaggaaattagttttattactatatttattttgtgtcctaaaaaatgttmtttcatatgaccatggctttacattaaatggtttccctcttcattgggatatacagtatttcagctggatgtctgtatgatgattgtggtgaaagaaaagtaggttgaaaataaattaaaattgacttttcggtttaaaaaagtgactactttttagatagtaggctggatttataaatttagcttagcccatttatactcaaattcttagcagttttgcctataycaataaattcttagagatttttattcactggaagtttaaatttactgtataagtgaaagggaaagactatttttcaaaatgtactactaataattaggaaagaactctggaaaaatataattttccaaaatagaggtaattaatatgcaaagttatctagatatggagtatgcagttctccaaaggatttatttgttctttcttctaatttttttttttttgaaacagaatctctctctgacacccaggctggagtacagtggcatgatctcagctcactgcaacctctgcctcccaggttcaagtgattcttgtgcctcagcctcccgagtagctgggactacaggtgcgccaccacgcctggctaatttttgtattcagtagggacagggtttcaccatgatggccaggctggtcttgaactcctggcctcaagctatctgcctctcaaagtgctgggattacagacgtgagccaccacgcccagccggatttatttattctttcaacaaatatttattgagcaaattccataggccaggccctgtcctgggagctggcgatgcagaactgagcaaaacagagtcgctatcctaaggcagcttacattctatttggagagacggaaattaacaatagacctgtgataccaggcagtaattaaaataagggcaataaagattagaaagcaaagggggcgctagtttgggtagatagatggatgaggaatctttacgatcatagggctgcatttatgctcacgtgggcctggaatcagccattcatatccacatctgtcatcatgcagctctatgttgtctttctctttggggcctgttctttgctagcttgtgttggtaaagaattacatgaggccaggcacagtggctcacacctgtaatcccagaactttgggaggttgacgggggcggttcgcttgaggtcagcagtttgagaccagcctggccaacatggcaaatccctgtctctactaaaaatacaaaaattagccgggcatggtggcaggcacctgtaatcccagttactcaggaggctgaggcaggagaatcacttgaacccgagaagcagaggttgcaatgagccgagattgcaccattgcactccagcctgggcaacaaagtgagacactgtcttaaaaaaaaaaagaaagaaaaaaagaattacatgaaaaaaaatagtttgtgttatttacaatcaaatcagccaactgtagagattgtctggcattgtacacattgttctgataacagtttaaatactttgaaatttgcatcattaccatgggagagacaacgtgttcttgttaaaaaaacaaatcaaaacaaaaaaaacataaaaacacacacagagtagatgattaacttacatctcaatgtgagcaaatttttagtttcaggttttgtgacttcataatctctggggaattttccttcttaatgtttaggaaaaaatcactccctactgctttttaaagaattawaagtctcacttgtgtgttaagaatgtgcacttaggcctgttaaaaaattatgattacccccaaaatggtgggcttgtatgaccttttacatttttaaagtaaagccttccatctggttaaaaaataccttttataaaagcccctttacggtgtttgtgttccttagtaaatgctagatttgttccttagaaaatttgctcttgagcaagtctattttgacctgatgtaattgaatccaaagggagaaaaacattaaattaatgaaattttattgaaaagacatcttatttatatgtaatagtttggtgtcttaattattattattctcccaagttatattatagttttaaacttaattttcaaaaaaagacaactttcagtcacctaattacatgcaatgcagcttcttttcagaagtaataccttatttaaagtaattcttttatratgaactcccaaagacctgtacctaaacatagcagctgaatataatttctaattaatgacttttttaaggcataatagcagatggttgagccatccatggggtgtgttgtggtccatttgtttagtcacccagtgagttacttgaaataatcacttagcactacttttaacaaaaggatctgatttttctgttctcatctcacaccaaatgtaaatgaactctatgggaacaaggactttttctgttttaatcactgccatattcccagtgcatagaacaaggcaaggcctgtggtaaacactgaatcaatattgggtagaaaaagctsttttttttttttttgagacggagtttcactctttttgcccaggctgaagtgcagtgacaggatctcagctcacgcaacctccacctcttgggttcaagtgattctcctgcctcagcctcccgagtagctgggattacaggcacataccaccatgcccggctaattttatatttttagtagagatggggtttcaccatgttggccaggctggtctcaaactcctgacctcaggtgatctgcctgcctcatcctcccgaagtgctgggattacaggcatgagccaccacgcccggccaggaaaagctctttaggtaggacttccctgggagcaaataacagagtgtgtagaattgcatgtttttaaacgatgataaacaccaaaggcaatgttcttcttaaacattgaaagagaaagagaacgcccaccagacacagccagaaaagagaatatggaatctggagagcaccctgaggtgggcctagggtctccttcatcctgggatagtgctgggtgtttggtaggccccaaataaatgtagtcaataggtgcgcattcgattcaattcaatgcacatttgaggaccggttatgaattgtgcaagtcactagagagaatacaacaatgaagaagacaaggtctttttcctcagaggattaaagcctcagattttttagtcccagtaacagagttttacttttctttcaagagggctgcatctctgaaccaccgtctagggactccagtgaagaagctctaaagagctaggcctgagaaatcacccaggtcagctctgcccatcaagcatgagatgtagagcacacctatcaacgtggacttgatgacctcagattctaaatgcttctttaccygtcttgaaatgaggatttctctccctacggcccacataggacgctcacctcgcttgctgggagtcacctttgttggcattgctggcgtagctgaatttggcgatgcttttgctaaccgtgttgtctgctgactcatctttactacacagatgagaaccagaaaggttaagtggctcgcctcacatcatgctgcttgtcagtagctgagccagccccagtatgcaagtcttctaactcagaggccagtgctgtttccatgacaccctcttccctcaagtcatctgtgtgtgggaggcagaaaatattgagtacacccaaattgcctatcagtggaatgttagtcagcattggaaatgagactgattacaactgcagcctgccacgcacagccatcccagagggacacaagtgtctaccttcttcaggggtcttgcagccctaggaagttatttagttccatatattgcagacccttagggaaaataaatagtgatggcctcagagagaagggagagaaaatgatcccttcccttcctgactgtgggatcttgagcaagttatcgaatccttcggaacctctgkcttttcatctctaaaatggctacaagagtgcttgccttatgattgttgaaagaaataaatgcacgtaaagcccttagtaagggcttagactgagtgcttaataaatgttaggtgttattaaagagttattatttttaaagataaaatcatgactcatacctatatcaaatgaacatgtgtcaaagatttatttaactgattaattaatgagggaatcaataagatgttacagccaattcacaggagaattcaaagagcaggtccatatagaagcggtcaggaatgctgaagtgaatttacstagtagatgcaaaactggcttcttccatagaaagggagggaaagcaactgcgcttccactgcacaaaatttactcatgtctatgagtaaaaatcacttacattgctcttcattacctacaacttacacrgtagtaaaattgctcgcagacccsaaaacaygcagagacctcatagaatcacataacctggaagggtctcctaggcaatgcctrgttttccattgacaacacccattaatcattctggttcatttcaacaattttctcaattacatcctacacagtgtgtattattgctcgtttcttaattacatcctaggaatgttttgagaaccaataaaatatgtgaaaagtgccatagaagccatgatgcattttacaaatagtagtggtagtctaaaagagaggagtgaggctgacctgtctgaatccgacctctgatactttccatgtgatcttggacaagtcacttaacatcctgtgcctctgttttcttagctgtaagtcartatatttaagattcactgcacagggttgctgtgaggattagatgaggtgatgtgggaaaatatttgggaaaatgaaaaatgctataccaagatgagatgtgattatgttatggctctcggcttagcttggggttcatttttctttaagaagaggaggctgtggaacaagagrtggggtggtgagttcttaaactcaccaggtcattattactgcaagctgtaaatcacatagagatgtctttaactcagtaacagttatttatggtactactgttagtccaaaagcacttctccaatattcactcacccacatgccctcatggctccagagaggttagtggtgccagcaatggtgatgttgatgaccgtgggggctgtgtgtctttaattaaacctgtaaggactgtattttattctcccccacctcttcccccagcgctgtcatcccagagtctctcctggtgatcatgtacaaagagactcatttcatcagcctggggggactctcaggaatttgcaggaattgggaaggaaaagctctggcccagcacactcccctcctggtctagtctgcatttggtaattgagaagggataggagggtttggagtgagtctaggatgtgacactgaaatcatggaaaggagatgaagaatgagccctgggtgggaggggcagctgcccagcctggaaaagagcaagggtcgggggcatgaccccgtgtgtaggaagatgcttccagtaggccggctctccaacaaggctggtgcaagagaaagtaacttcaactgcaactcacgggtttgagttatggagactgaagagctttctgcatacgttggtgaataccatagacacaattaagaaggttgcactaagttcttctctggagattttgaagaataagaacagatctctcccagtctgagaggttacagatcatgcctccctagaggcaatagcctgatttggatttgaagaaggaaaaaaaccaagtacaggaaaccacacctctattgtcctgccttgcttattgtgagtaagggaaggccgcccggctcgcctcctctcccccacacccatgaggtgacccagcacaccctgctcagctgtgacatggcattcactcctctacctcctggttgtcggyagacttactgcttctccttagactgagctctccaaggcagagccttggtttctgcctctgtgtccccacatcctgatgcaggcctgacacagagtaggtccaacatacttgttgagccagtrcattgacgagtgacttattgaccagctgaggccaggtcagcagaaacctcagtgcctgagatgacaacatcagaagtcctcttgaaaagccagtttggtaagccaacctttgggcttgagctctggtgagctattcaccagaaaatagtaaaggacactgaatttcagtgttcatagtgagactattttcagctttctcagagacagcatctgtaaataatcaggcagaagcctyttataaaacaacataggaaaaacctcaaaggctattctaaggctgcaccatttaaacaagatttttaacccatggggacgccaagatcaacatggagcttcctgcacataaaagtctggaatttcatagcaatgtgggggcaaaagctatgatagcatttccccctttctaaattatatactgcttagtgttaatgtgagcagagggctggatggcgacgggctcgcagcttacgtaagtcccactacgatcttcattccttctgtaatgcaggatccatggtgatggaggttgggggagtcaccaggctggctgcactgatgtaaggcggaagggtcactcctaggtcatgccatgatttaagtctttggtgtaatttataacagggctttcattccacatagaaaaatgatcagggatgttggttctataattgttttctctstctaaaagatgctgttctggaaactcggtttagtggcagctatgaatgctcatctgtagcacctcccttttccctcccatttggaaggagcaagagactgtcttctaggatgagagagatgagagagatggcattaaagcttgacatcagatgagcccttcagctctctcaacctgcataattctcttttgggaaggagagactggtctccaagcacttcttacacctcctctgaaccaggaaccatatcagcacattctgactgagttaaccttaattgtaaaagactgggaaaaaaaaacaaaacaaaaaaaaacaaacaaaaaacaaaaccagaagtcgttcttactatcagaccagccctgggcgtgtgtggtcagtatgataggaaagctactgaaagttcagtctgtttcccttaaaatctcatttactggtttctcaagttacctgaaatttctgctagaaagagtaatttcttaagatttttctaggaaggcattcactgatactgggaaggctagtatttgaacaactatcatcatggcacctgatagtttatgcactgtgaagaagaaaaaaatgatttataaccaaaaggatttttgaggctattttgttaaaaaaaagaagaagaagaattttatttggaagaaaataatacatattttaattttaatcctgtgtattctagacttgagggaaatgtcacatcttcatttttgtattcctagttaacacgatgtcctgcacatgttctaggccaataaataatggttttattttgttttgttttgagataggatctcactctcttgtccaggctggagtgcagtggcatgatcatggctcactgcagccttgacttcctgggctcaagcagtcctcccacctcatcttcccaaggagctaggattacaggcatcaacatcacacccagctaattttttttgtttttttagagatggggtctcactatgttgtccaggccaatcttgaactcttgwcctcaaacgatcctccaaccttggcctcccaamgtattaggattacaggcgtaagccactgtacccagctccagtaaatattgttttgaacaaatgagtgrgaarcgtatttacagagaaagcttcttgggctggctggctgtgggtccagttgtgtcttatttctaaaaactaagaartttatataaacaaaaaatcaaagtaggaatttaaagagagcattagtataatttttaataacttacacgttttatctcatgggtttcataatgtgtatgagcaaataaccggactcgccccatacttccatatgtacatgcttagaatgtaatgcataggttctgtgtgtgtgcacgtatgcatctatgtgtatgtattttgtaaataatctataataatctataaaatatatttataaaataatctataaaaatataaactattaacagtagttacctctggggggtaaaattggaaaaggtaaaggaaactcacatttttaccttatatattgctccttgtttgaatttttcttytaatgagtatgcatttgtrtatcttgagttcttagcatatggcctggcacttaataaacattttattcaatgtttaacaaataggggaatcagtcaattgagtggcacaaaaattatactcaaacatttgattttgagaggtttaggagaggaatgatgataaagaaattgaactgagggcttaggaaagagagcatggtctggatgtattgctaaaagaggccgtcggaaataaaggaatactttggggttaccattgctaaactgcgtattttctacccttaaaggtgccccaagttagatacctgtctggcaaattacgtagtcctaatcataggtgttcttaagggtttatgtctygactgaaaagggacaaatcacctggcaaggagaccactacctaaccctggtgactcttaccttacagggctggacagacatgacagtgtgaaaggcctttgtactctcagccatgtggcttgctggaccatctgaaggcctactgagactgtcctgsgaaggggacagcaatccagtgactcacccagcagtaatttgcctgggttgactggataggcctgtcctgtagattggtatccaaagattaatatgatgggtgagaacttttagctccaatccagctggtgtgacccaaatgcataaaactcactcttggcttctcatcgaggaactaagttggagatattttaaaatgcttgaatggcagtttggagtctatttgaaaacactggcaggaatgtctagataagactaccatcagtggtcaatcactggaatcactgaagtatttcaactgagtgaaggaagtgccactcagcttcagtctgggtggcagagtcctttcaaatgtgrcttcagcaccgactttctgtgcattactcatgctgtgaagtaggtgatttaagccactgactttctaaatyaaaggcacaaaaaggcagacatgtaattcttttaattacacattcatatttctcytacattcctctgagtcgttcatgtctgcctcctgcctcatcagcctacaagcagaaaacaagcaacagggaatgtggaagatctgtaaagggatgaaaaacccaactcactygtttgtactgtggcttttctcaaagaaaaataaaagcaccgtgtckggaaacagacaatgggagatctgacttctacygatcgtagggaatagtgaagtatttcaagataggaatgagtcatacctttatacartttttgccatctgctctctattaacatgggctattagtaaaacatatttggtttatatcaccaggcaaggagattgcattcatcttgtttttctatcaaagtatatgcatataaccttaatatagagttttcacaacttagcagtagagacaggttttgttttcagatgtgtagccctgtacaagttaaagctgtgtggctttgttcactgcctttattaggstttccatgggaaargccaggcagggcagggtaaacaggttaggaacggctagtttgaataatttccgataggtctaaactatagatgtggtccctagttgcttggtacctggccctgggatgattaggagagaggagcattgcttcctgggttctatgggccaggtagtagaggaggtgtggctctaggttggttagtttgcataacaaaggcatgctcctttctgggcccttggctatctttgagaattasctagccctggagggaggwgkagtctctccccagcctgaaagggtttttttaaggatgttaaaacatcatcataatatacaaaaaataagaaatatacacaaacaaatgagtttaacattcgaatctttctcagtcacctctcttggagttgcaaaatcatttgccaaatctgttctcatttacayagtccttaagttactgtccagtcaggcgtttaacctctaccttgagggaaagataatccagaaccccctttgctttacctagaaaattttttatcgctttttagaattttagactctttatgtttctgctrtatttatacagaaggcatttaatctacatatattttgttgatttataaaacccagtgaggcttttttcctttttggtgtccttggaaataccgaggcatcaccccagtttgccatgatttctcactgcagctatagccagaggaaaatttttcctgttctgagactggagcaatgttggggctgaaatttcattttagtgatacacgtgytamattgccatcaaacattttatcatctcatgtttggatgattttccagttatctattgcatgaaacaaggcattttaaaactgagtgtcttaaagcaattgattattattattattgctctggtcctgtgggtcaggaattcagactgtacagcagacacaactctcctctgcgccacaatccagggtctcagccggcatgccaggcagggatgagagttggaattgctgggggcggccyggcactgtctcctcctaggccctctccaagtaaccagcttgggctccctccagcatggcagcctcagggcagtcagacatcttgcaagggctccaagaacaaatcttccaagagtcagaaagtggaagctgctggtctcttaaggcttagcttggaaattggcacggcattctttctgctgtattctgttggttaagttttcacagagatcacccccaccaacccactctgcaggttcaaggggagaggacatagatatcacctcttaatgaggggaatagcaaagaatgtgtggtcattgtttatctaccacagatgacatatcaacaatcccagacattcagcacatctacaaaaattatttttatctcactctgcatctgcttaagaaggtagatattcaactgcagttcatttcagagttcttcctgtataaagattgttgacagcaaatgttttgttagaagcgttttgatagaaacattttgacttcaaactcagataatgactctgtatcatttaaaatatatacagggctgggcacagtggctctcacctgtaatccagcactttgggaggccaaggtgggcagatcacctgaggtcaggagtttgagaccagcctgaccaatatggtgaaaccccctctctactacaattacaaaaattagcctagtgtggtggcatgcgcctgtagtcccagctactcaggaggctgaggcaggagaattgcttgaacccaggaggcataggttgcagtgagccaarattgtgccaatgcacaacagtgcaacagagcaacagagcaagactccatctcaaaaattagaaagaatagaatagaatagaatagaatagaatagaatagaatagaatagaatagaagtatgatgccttacattgattggatattttccagataattttaagatatattagccaatccctacatcagctcttttcattttgtggatgaggaacctgaggatctaaatggttaactgacttgtcccagatcacatgactgactaccaatgrgggcagaggtgttaaaggaaaggggtcctgatccagaccccaagacagggttcttggatctcgcacaagaaagaawtcagggcgagtcctcagtgtaaagtgaaagcaartttattaagaaastaaaggaatgaaagaatggctactgcatagagtagccctgagggctgctggttgcccatttttatggttatttcttgatgatatgctcaacaaggggtggattattcatgtctcccctttttagaccatatctggtaacttcctgatgttgccatggcatctgtaaactgtcatggcgctggtgggagtgtagcagtcaggacgaccagaggtcactctcatcgccatcttggttttggtggattttggccggctccttcactgcaacctgttttatcagcaaggtcttyatgacctgtattttgtgctgacctcctatcttatcctgtgatttagaatgccttaaccatctgggaatgcagcccagtaggtttcagcctcattttacccagctcctatttaagatggagttgttctggttcacatgcctctgacagagacagacccaggattgagttagtttgtactttcactgatagtttccttgaattccttaatataggtagaagtaaactgaagaccatggtaaggactttttaaagaaatatcaccatttgggatattttatctcttaraatgaagaaaagatcctttattttaggcaaatacttggtgtttatgtggctcttaaacttacaaagtatctccatacccattatctactttgctccacatgctgatccaatgagagagatattaataacactattttcaaatagagaagcagaggtacagagaggttaagcaaatcacttaagggtcacacrgctaactgtagaactggtgcccaagcccagaactttaaactctgaatcctgccatttctcactgtgttcttcacccctccctcaccctggcttcttgggccttagagcagcccacacatggcttagctgtgcggggcaggaccatcctcctcagggacaaaaatgggaggcctccgaggactgaatcgcccaaagtggttagaggaaggcaaaagtttcaagccaccagcagcaacattagaagaaatggggaacactctctaattgtggacagttccaattttgtccgtctccrgggagaactaatactgttacgatttctcctgatgcatgtgaaatcagttgctacagcaatgaccagtgtttcttggaacttgctgacagcaacaggcctcagaaatgaaatttctgttctgtgtatcgtgtttctaacgctggctccactatttcagcacctctactgtgtccacttcccatgatgatctcttcctgccccttcctgcccagaaggtagggcaagataagtctctgccccagtcactagacrggcatgttgatgatggycttgggaactgtggcttggcggtggtccttaggggaagggaacttgtctgtgttggtcaccactataacctttagaacaatgcctagctcaagtgctaagaaaaaacacacatagtcatgcactgcataatgatgttttggtcaatgacagactgcatatgtggtcctgtaagattatgatggcgttgccttatacaggtgtatcattgtttatcttttatatcatatttttattgtaccttttctatgtttagatatgctcagatacacaaatacttaacattgtgttacagttgcttacagtattcagtacagtagcatgctgtataggtttgtagcctcgtagcaatagcctagctgtgtrgtaggctatacatctaggtttgtgtaagtacactctgtgatgtttgcatgatgatgaaatcacttaaccatgcatttctcagaacatctccctatcattaagtgatgaatgaktgtgtgtgtgtgtgtgtgtgtgtctgggtgcatgtgtgtgtatatatgtaaagttaatgaatgattgctaattactgcagttctttaaacctggtatactttcccacacatccatgcccttgcccatgctagaccctctgcctggaatgcccttcccttccttcttccttttctaccaaccctccgcccccaccccccaccgcccccacctgttagcttgccaagcttcatctcatgctctccagagtgtaaggcaagataggtcttctaaatttaattattatattatattttaaaactttaagtacagagacctgaaggaccttaatcttccctagagctggtgccttccccatgacccccaaagggaaggatctgaacagtgtttgtgccgtggcaggggcccatggcaccgcccagcatggcggtggaggagtcccaaagctttataatgtgaatggaaacttggagttacctcttgctcataatgaaagagattccctaccagagaggaggcacagaagccattttcaatgagtcatggaattcctctaggatataataacaagccatttaaccaaaatgttgagggagcagttaaagagacccataagtcacagagagccttgcattgactcccattatatctctcgtcagcctctgacctgattcatcctgcttttcatccttccctctatatcagatcatctcataatccccagttctgttgagtgtttcagtcacctccagcagccagtgtgggatcagttcttcactagatccctggctgctctttactgttttcagcttgttttwtctttttgatgaaacaatccccaaaatgaatttttttgggggggtgtcaacacttgtaaaatgtcaggtttgcattgttatctgttagattttttggtttctttaatacagcaggaactggagaatctagacaaagaggtttaaaagttgagtcatctccccacaaatatttcacccacatctactagcatgatgataactcagttaaaggttgtgaaaatcagtagtctgacaaggaactagtactattgattatcatttctcattatttttcttcagtccaaacttattttaagccaaacatattcaacaccaaagtattgagtagttgaagaaaggcagatgtgcattacagtgtaattaggttcataagttactatgacaggcaactgaataaacctcagtgttactgcacattttgccagaaaagttgtgaagctattttttccacttctcttagatcctgaagagccacttccttttctctgctgacacatacctgcttgccccagtgccttggaggaacttccaaaggtctaaatgaaaagccttttaaatttcttagaagtcatgaagtcatgacttcgtacatacagcccaatgtgtgtagatgacaagaggggcaacttttacaaatttaagtcaattttatagccatctgttgtaggggatacaaatattagtctatgacaggtaaacwattatagttcagtaagccacaataacagcatcttgtacaaaatgatgtgatggtgcagagaagctcttgaggagggtggtaaggagttaggcctaacttgcatctagagactggaatttatatctgggatggagttagctttgtaacratttaggcgctacctcatccctaggcctaggagaagagatatcacaatgatacaaggaaaaggcagcagtaactgaggatagaaaatctaggtaggagccctcgttctgcggtttgctagttcctgacttcgagttgtctgktcactttagtgagggggtagttgccttatctgtaaaatggaaacggcattaattcccacatcacacagaactgttgctgcaatcaaatgaaataatgttagtaaactgcaaagcttcctgcaaatgtttgccattgccttggctctccagtgtrtgtaatgctggtgacataaataatagcttcattccrtgtttgcactgatgcattttgaatgtaacctttgaaaattaggatcctcttgtctttgggacagtagttttattaggtgcagagaagcatttgaatattccaagtgaaatattaggaaataactcctgcaatccttccttgctttgcaggtgattgcacagttttaaaaggtgcttgaaatctcttggccacmctcacaaatgtattactggaccttaatcagcagttctagagaagcagcacctgtttgctgtggtctgcaggctgggtgtctgagaacaagcctgtttgggggttagaggcccagctttatccttgggcaagtcacttcatctctgggccgccctttcctaacttcagattcagaggtcaaacccactgataattaagggctcttctatccttaaagatctgtgtttgcataagagttcggttttgttttttgttttttgtttgtttgtttgttttctgagacacagtttcactcttgttgcccaggctggagtgcaatggcatgatctcggctcactgcaacctccgcctcccgggttcaagtgattctcctgcctcagcctcccaagtagctaggattacaggcatgtgccaccatgctcagctaattttgtatttttagtagagtygaggtttcaccatgttggtcaggctggtctcaaactcctgacctcaggtacctcaggtgatccacccgcctcggcctcccaaagtgctaggattacaggtgtgagccaccgcgcccgacccaagtttggtttttgttcatttattttgttttgcttttgcttactctctttaccaatttgcaagtcacccctgaagcttcccatttgaaaattaaattttattttggaaatcattgtaaattcacatgcagttgyaagaaataatatrgagttcctrtgtaccccttacccagttcctcccagtggtaacatcttacaaaactgtagtacagtatcacaaccagaatattgacactgacaaagtcaagatacaaaaaatgcctgttatcacaaagattccacatattttcttcccctttcctccacctacttcytcatcactggcaaccactaatatgttctccatttctatagttttgtcatttcaagaatgttgtatcaatggaatcatagagtatataaccattcatgattggtgttccccaaccccactgagcataattgtctagagattcattaagactgttgcatgtatyagtacttcattcctttttattggtgagtagtattccatcaggttatatgtactgtatcatagtttatttagctattcactgtctaaggacatctgaattatttccaggttgggggcattatgaataaaactgctrtaaacattcaygtacagatgcttttttaaattttttatagagatggggtctcattatgttgcctaggctggtcttgagctcctggcctcaaacagttctcctgccttggcctccgaaagtgctgggatcgtagcactgtgcctgaccagtatgtacatatttttgtgtaaacataaatcatccttctctagaataagtgcctagaagtgaaattgctgagtcatatagccattgtatgttccattgttttagaaactgccaaactattttccagagtgactgtaccattttacattctcaccagcagcatatgagtgatctagctttcttacatcctctccagcatttgtggggtcaccgttttttatgtcagccattctgatagatgtctagtggtatgtcattatgcctttgatttacattaccctaatggctagtgatgttgaatatctttctatgkgtttatttgccatccatctgtcttcttcagtcaaatgtctcttcatgtcttctgcccatattcaaatgagatcatttgtatttttgtcgttcagttaattcctttgattaatgtttgtgtggtataccttcttctatcttcttactttcaaccttcctgtatgttatatttgaaatgagtttcttggagacagcgtataattgagtcatatgtttttaatcaactatgctgttctccatctttaaatcgtaatgctttaaatgtaattattgatatgttagggcttaggtctgctcttttattttttgtcattgttacctgttttttatagctctgttttcatttttttgcctgccagtgggttatctgaacaatttttagrattttgttttgatatatctatagtggtttctagtgagtccctttgcatgacttttttagtggttgctttaggtgctggattatgtgtctacataacttatcaaagcctacctctattgtcatttcgctagttctagtgaagtacggaaactttacctccctttatcctttccatttataatatgtttgtctttaaatttacctatatacattaagaaccagaccagttttataatttttgccttatcatcaagcataatttagaaaactcaagaggaagagaaaaggctattgcatttacctatatttttgtttgctttgttcttccttcctaatattgaaggttttgttttctttctttcttttttttttttctgtttagagcactttctttagctaatttttcagattaggactgttggagatatcacttagttttccttcctctgagaatgtcttcctttcccctttcatttctgaaggatatttttgctggatataggactctgggttatcagtttttttctttcagcacttgaaaactctctcacctcttccttctggcttccatattttctgatgataaaatcaccatcattcaaattgtctttccaatataagtaaggtgtttttttatcttgctgcttttaaaatgttttctttgtcctttgtttttggaagtttaattaggatgtgtcttgatgtgtatttttttggctttatcctgtttggarttcactcatcatctgaatatgtaggttcatttctcttgccaaatttgggaagtgttcagccattttttcttctattacttttctatctgctcctcctttctcctctccttctaggacacttatgacataaatgttagattttttgttatagtccacaaatccctgaggctctgttatttgcttttcaatctatattcgctctgttattcagattggtcatttttactgttttgttttccagttcactgattctctccctattttctctgttctttgtttttgttttttgtttgtttctggtttttgagacaggatttcacttttttgcccaggaactacaggtgcatgccactacgcctggctaatctttgtatttttttgtagagatgaggtttcaccatgtttcccaggcatgtctcagatgtctgggctcaagcgatccacccatcttggtttcccagagtgctggaattacaggcgtgagccactgtgctcagcctgctctgttccaatgagtttgattgataaataactttggttatttattttttagttctaaattttcatctggttcttctttaggtcatctatttcttctctgagatagtcagtttcttttccaaggcttttttttctctttgtttgaaacatattaataattgctcattgaagtgatttatcatggctgctttttaatctttgtcaggtaatcctaaaatctctatcatctcagtcttggcatctattgattgtcatttttcattgcatttaagatcttcctgtctcttgatatgacaagtgatttcagctgaaaccaggatattttagtattatgttactagactctgaatcacatcaaaaccttttgttttaagctggctttctctggcaggacttcagcaagggacgggtaggcatcacctcattactgcttaggtggatgcagaagtccaggtttctactggatctccattgatacctgagtggtatcatcattattattgctaattattaagcattattggtgggaagggatagaaattccagctctcygtgtggttcttttgatagcgcagtaggggtggctccattatgggtaggcagtagtaaaaatccagtcactcyactaagcattctcttaccccaccccagtggggtacagcccaacaggtgaggasagtctrggttccccacccaggctttgctggcatgggtggaggtggggattctgtggtttttggctggtgttgagcatktattattgaaaagttttctattttgctaggctgcttcattcctgaagagatgagcttttttcggatattttttttttgtctgtgctctttggcatttccaggttgttgtcttcttcactataagtctaggatagaaataattgcctggtgtgatggctcacgcctgtaatcccagcactttgggaggccaaggcgggcagatcacctgaggtcaggagttcgagaccagcctgggcaacatggtgaaacgccgtctctactaaaaatacaaaaatacagcatgcctgtaatcccagctactcgggtggctgaggcaggggaatcacttgaacccaggaggtggaggttgcattgagctgagatcatgccactgcacttcagcctgggcaacaagagcggactccgtcttaaaaaaaaaaaaaagaagaacaactcagccatgtgttgttctgtgagttctgagatctctagccaggcttcctttactccacctttcasagtcttcttatgtttgtttcctatctgatgtcaggattttagttatacttggcaggagaagtggggaaaagtgtgtccacttcatcttctacaagtggaagtcctggaactttcatttttagttgacttggtttttcaagctcaatattttatgaacatgctgcaccacttaacaaagcagaaggataccaaaccacctgcaggaaacatttgtttctagggtttatgtgaaaggaaaagtgtctaccatgtgcttggcactttatgcttaatttcacttaatcctcagaagaatgctacagggagggtattattaaccccgatttacagaggtgagaactgaagttcagagaaattaagtaacttgttccagatcacacagctagtaattagaagatctaggtctcgaagccagttttgcccacatttttctccccgccacatgcctcagtcagcccattagcgcartgaggacagagatgatctttcctccttcttgtgcttatctgtgcctaggaaatccatgcaactccatgtcagttttcaggtaggtgaaacatgctcatatatgcatggtatgtgtataagtgtaggtataactgcataataacaaaggagctctatacttacagtgggtaattaatatctatggtatcaaagtgaacaatttcacaatgttaacatgttctagtattattgctatataaagtgtgttcatgatataagagactgattttcaatgatgaataaatacctacaaaatcataaataaaacaactcattggtactttctataggaatgcttgcttttttgggaaagtagacatttcttttatttttttgagacagagctttgctcttgtcgcccaggctggagtacagtggtgtgatcttggctcactgcaacctccacctcgtggattctcctgcctcagcctcccgagtagctgggattacaggcgtgcaccaccacacccagctaatttttgttttattagtagagacggggttttgccacagtttggtctcgaactcctgacctcaggtgatctgcccgcctcggcctcccgaagtggttggattataggcgtgagccaccacgcccggcctaggagacgtttcttttacagcctaaaccatttgcatgcagaatagccagataattttcttttagttgtgaaaactcattggttctgtttaagaggaataagctgataataagtgtggtacatggccagatgcggtggctcacacttgtaatcccagcactttgggaggctgaggcargcggatcacttgagrtcaggagtttgagaccagcttgaccaacatggtgaaatcctgtctctccaaaaaaaaatacaaaatttagctaggcgtggtggtatgtgcctgtaataccagctactcaggagtctgaggcatgagaatcacttgaaccccagaggtggaggttgcagtgagtcaagatcgtgccactgccctccagcctgggcagcagagcaagactatctcaaaaaaataaaaaataaaaattaaaaattaaataagtatggtacacaatcatttctgaattargcagttcaatcctattttagtgtgaaatacattattatggcaaaattatttcctaargagctctatctatacacattaatgaatttagacctacttcctctgtctgaaatttgacttaaagaaataaccttaaatctttttcctcccatgcttttattttcctgtcttttttttttttcctttttctcaatatttggtaatacttgaattccctggaggatttcaactttgagaccgctatgaataattcaagcttaatcttgccttcattcctttccaagttcaaaatctgacatttttttttctgtttatgaaccacaggagtttttgttatcatgattgaaaagaccactaaaggagatgcagtatgtgatgtattatttattgaaaacacagatgggattacatttatgatgagaatgtttctgattcttaaatttaagaatctgatacctgctgagttaggaaaaagagactgacatttgcaggtatcaggggccaggcactgtgctgaccttttaataacgttttctcaggtatcattgtacctagtttcccaattaggaacctggagtttagggttaaataacttgtgataaggctgggattgaacctaaagcccatgatcttcccaggacactgtcctcacaccatgctgaaaaccaaagaaattgacttaacctcttgcattctgaattagagttattaaaaattcatttcctaggttagtgccaactggattccttctctgcatgagtcatattcatcattcatccagccatttattatattccttctagcccagggttttgcaattctgactatatatccrgatcacctggggagctttttaaaaatataaatgtcaggccccactccccagagattctgatcattggcctagggcgggctccaggcagctatttttaaagtccctgagtgattctgatgtgcagccaggattgatacattgcagtctcattgcaacccctcatctctgacatcactccctgtggggtccattttatgtgttgactttactggttgtggggtaccyaggcattcggtcacacattgttrtgtgtctgtgaggatgtttctggacaagattaacgttcagattggtagtgtgagtaaagttggttaccttccctaatgcgggtgggtttcattctgtcaactgatgacctgaataaaacaaaarggctgattcttctctgaataaaagggaactcttcctgcctgactgccttcraagctgggacattatttttctttcttttttattttctcctgccttcagactcaaatggaaacattggctcttcttgggttttgagccttggctttcagactgaaactagcgccatcaactctcctgggcctccagcttgccgactgcagatcttggtacttaccaggcttcgtaactgcatgagccaatcccttataataaatccctttctgtatatacactacctattggttctgttcctctggagatcactgactaatacacttcctttttaactaagacctctaggcacttttgctatctctgaggtttttcatattttatatccctagagacaaaatcaaagaaaatttctttaaaatggggtttagatggacatctctctgaggttccacctcaacastgacacagggcagatgtggctcagcctcaggaagctgaaattctcacccctgtgtttccctcagccagcggaggcctttcgactgtgcccrtctagcagaagcagctgtgagatcagggaacacaggaccttgctaacagaccccaggcttgctgagtggtccagttgcaggaagagcagcytagggagtgaagctgcytactgcaaactcacattgtcccgtcatcgctcytgaggtctggggtcagtcctctcagggtgctggccagatgccaaagctgagcttaggacytggagcccagcaccgagtgaggaggtaattacacaacgacacaagagaaagacacaccaaagtggggagcagaccagtcctggagagcactgaggaccaggccagtgcctgactccagtccagttgttacaggaaaagggtccccatccagaccctgagagaaggttcttggatctcacacaagaaagaattcagagtgagtccatagagtaaagtgaaagcatgtttattaggaaagtaaaggaataaaataatggctactttatacacaaggcagccccgggagctgctggttgcccttttttttttttttttttttgagacggagtctcgctctgtygtccaggccggactgcggactgcagtggcgcaatctcrgctcactgcaagctccgcttcccgggttcacgccattctcctgcctcagcctcccgagtagctgggactacaggcgcccgccaccrcgcctggctaattttttgtatttttagtagagacggggtttcaccttgttagccaggatggtctcgatctcctgacctcatgatccacccgcctcggcctcccaaagtgctgggattacaggcgtgagccactgcgcccggcctggttgcccatttttatggttattttttgatgatatgstaaacaaggggtggattattcatgtctcccctttttagaccctatagagtaacttcctgatgttgccatggcatctgtaaactgtcgtggcactggtgggagtgtagcagtgaggacgaccaggggtcactctcattgccatctgtttttggtgggatttagctggctactttactgcaacctgtattatcagcaaggtctttatgacctatatcttgtgctgacctcttatctcatcctgtgacttagaagtccttaaccgtcaggaatgcagcccagtaggtctcagcctcattttacccagcccttttcaagagggaattgctctgattcacatgcctctgacacagtgggcaagcagatgaacggcaggccaggtgaaaaggccagaagccccatgggtatgaccagaagagaaaatgttgggatggggtgagagagagatgggaaggtaagtcagaagtctctccactgttgcatacctataacttatttgtgttgaccaccagccatatggccatgaatggatcagcgtgattgaaatacctgtgttggagcagctgatttttcattcagcttatacagccccaccctactgggggaacctgcccccaatatttcaacgtaggttctattttctataagtgtcagccggctgagaaataaagagagacagtacaaagagaggaattttgcagctgggccactggcggtgacatcacatatcggtaggattgtgatgcccgcctgagtctcagaccagcaagtttttattaagggtttcaaaaggggaggggctgtaagaacagggagtaggtacaaagatcacacgcttcaaagggcaaaaagcagaactaataagcatctaacaaagatcacatgcttctgagggaacaggacaaagggcaaaagcagaactattcataagggtccaacaaaggtcacagggcaaagggcaaaagcagaactactaataagggtctatgttcagcggtgcacgtattgtcttgataaacatcttaaataacagaaaacagggtttgagacagagaacttgtctgaccacaaatttaccagggtggagtttcccaaccctagtaagcctgagggtactgcaggagaccagggcacatctcagtccttatctcaacckcatcatacagacattcccagagcagctgtttatagacctccccccaggaatgcattcctttcccagggtattaatattaatattccttgctaggaaaagaatttagcatttataggctctctgcaagaagaaaaataaggctctttttgcccaaccccgcaggcagtcagaccttatggttgtcttgccttgttccctaaaaatcgctgttattctgttctttttcaaggtgcactgatttcatattgttcaaacatacrtgttttacaatcaatttgtacagttaacacaattatcacagtggtcttgaggtgacgtacatcctcagcttatgaagataacaggattaagagattaaagtaaagacaggcataagaaattataaaggtattatttgggaactgataaatgtccatattaaaatgaaatcttcacaatttatgttcctctgccacggctccagctggtccctccgtttggggtccctaacttcccacaacaccacccttcgtcccactttaaattcatgtgtgactccatcctgtcttttgaatattttgctttattcagtaacacaagttcatgacttggtaaaaaaagccgyggcttacaacatcataagctagttccccataaattgctgccacactgataatacctttaaacataggaaacagcattttggaattctgtgttttcaagtaaattttagttcattttagtgtcttgcaaatagcaggcagaggaatgatactcttaccatttgctttttttttaaaccacattttcccaaactttgaaaaacaattgctaataaacaaaccaagccacaggaattatttcagttcaagagaataaacagatttcaagagatcaaaagaagtcactgaagttcatctagcaatgctttcattcctatattatactcgcacatcggcgacatggtgtgtgaagataatggcatcagaatttccatttcatgcttaattttctgatggtttttgctatcttcattttaccttaaagaagataaataaataacccaaccaaccaggaatacatttggggmaaaaggaagatgcccagggttatatattggagttcttccaattccagagcagcagaagaaagcctcttccaatccyttgtttgtgccataggtatgagaacaaatggcaagacatccctcttccacgttgacttgccttcaggtgaatctgaggctgcccagtgacctggcaaaattggctatggagataktgtagacattttagatttgaaaagataacttttctcttacttttacccaattaggaccatttcctcaactctgcacttaggttacctaatggaggtacagctttaataaccaattccatttatcttttagaaattctcaaaagaaataagaaggatgtgtcttcagttaaagctgtctttcaaaaagatagagagccatgggtcactgaaaggaaaacaagccaccagcaaaacacacgttgtctcacacgctcttctgtcgtgaataacaatgtgtagtgttagtgtgagcatacccaggctgtctgtattctgtggggtgaagaggagcaaatgggtgctgctgccctagattttcccactctaggcattagaatcttgtctttcctaatgacctactgtttacccagttcatatatttataatgacacctgcaagggttttctttctttmtttttttccaaacccagagactttgaagacaacaaaaggataacttgggtgattgaaaacacacccaatggtaagaactctatacaatttgtgttcatgtgtacatgtaacaaaccatggagaaaatcatgtaggtcctgaaatatgttgccagttctgtctcactgaggactcagccgtagccagaggctaagtcctttgtatcatgatcctgtcccacttgagccrgtttgcacttcttactttgggatccttaatacgctggccatacatagctcttagtctttggttctgaagtctagtccttaagaactgagtattgaaaagtcctctcagtaggattagcattcttctgaggctaagactacagccaggaagttgaaaaccccttttgaagggcacggtgacttaacccttgaaggagaagtggctgtggatggctcattgtcaggaacagggacactgactcttcctgagagacgcttcagacccttccccaaagtggtaactcaggccatggcttctaatcacttcatgcccaattttatgtacttcctgcttgtgtgcacactcctgctgacccaccaagacccacacgagtctgaaagcaaggaacaaactttcgcagcagtagcgataactctaattcagctactgcaaagaccttttgttaggtgaaggtgaaacacttcacaagggaagatttctggatctttagatctctgctagatttcccaggtgcagcagaggagccaagagacgtccccacctccccacactctggtcagcctttgtgtcatccggccatgcttaactattaaaagtaccctctttcatactgttgtgttgccgttttactctgccaccttctgctagggcgtggtgctgaggcaggagaatagggtctggaggcaggaaacctgagttgctgaggcaactcccttttcaacccctcctttttctgcgtggcatttggaaaatgaaagtacctctgattggtcccctcccacaaccagactggtcatgggcctactcttcagccagtcagactggttgtaggccaatagaggaaccaacgggaaacctctagagggtatataaaccccagaaaattctgtaaccagtgctcctgagtctcttgcttgggccaggtcccaccttgtggagtgaactttcatttcacaaaaatctctgctttggctgctttgcttctgtgttttgtccaattctttgttcaaaacaccaagaacctagacaactaccctcaaccgataacaatgctaagtagaatagaattgtggaatcacacaagcctggaaggagttctgaaggttagtgccttaaagtatatcacgttttctgctgtcttaaagtggaggcccttgttggamccacatgtcaactcctccagaagccctatgtccctttcaggccctctcaggtccgccaagtttcagatcatcatgtagcgtggccagtgtgttcagcctttctgtccttgaaccctgaagagagagggcttgaagcctgctatgaagcctcaatacattgtacccagtaccatgtccccaagaactatactaaagcaaatttttgattatactccctctaaggtattaaagtatctccaagggatgataacccaactttgtaagcaaaaacgytgggataccaggaggatgcattgtgaatcaaaggccagaacactggccctccctgttacacctcaacgcttctagtccgaggcagtygctgagcactaaggacaagtccttggtgacaattagaaggatcttttctgatgataataattatactttcacaggcaactgagaagccttggctgtaacattcttgcaattggccttttgaaatcctggtctgtttcccttggaatacgggttgaatccctgtcaggaagccaatggtaactgcattttctttagtggcagttactggagattttacagaggaattatttaaaagaccagccaggacgaatggcaacagatctgaagaactataatgcaaataaaaatatttgacttcactcatgaataactgattttatattcctaaatactaagaaggttgtacaagcctccgaatgcagatagtaccaaaaagaacataggaggcgtattggtgagaatagctgggttttgatcagaacacattcacatggaagacaaagtctaccttccactccacccttgccttctcatgctgttatgagattggtgtttccatgtggrtaagtcacaaagaagaaaaaagttccttcactgatctagttgtagtttcactagggatacagaatgcatcttcacaaaatgaagaaggaaagtttacttttcaggaagctggaccatatgttcccagatgctgctttgctccaaaattcagggaaagaaggtttaggctacttcttaaaacacacacacacacacacaaattgttatttcttgaaacaacagcacaccctccaaaatagtaaatgttaccagaacaataataaatagtggcacacatgcgcatctttaaaacagccagtcacgccttccattgcataaccgacagccatgtgctcaggcatttctgtgatgattgaagacacattccaacagtcataaacatccatcacagattcaagtatgagttgcaggattccaaaaccacaggctgccagtttttggccattagtgacataccaagtgttactgagatctctgcgcaacctctgggtttgcacaatacggctgaaatgctactcagtggaagaaagtactaggggtgaaattacccttcagaaggtaattctgaagaaattcctaataaagaagaaaggaaacatgccgtttagagctaaaattgctttactgaaacacagtcaagtcatacatgaaatacaatggcctttatgctcagttcccctgcatgccttgggccctcttttcccttaagttttgtcatatgtttaagtatatattactggtcattccaagagcttgaactatgacagcctgaaaggatctacttatcctataaactgttgaacacaattggcatgagttggaccaaattttgctccatttttttagagcacacctgggcttcattgtccagtatccagagattatccagattagaatttttcaggaccctttccatctcctagatccccccggccrctgtcttcttgcggtctccttcctctctagtgacaccagcagacctgcactggagatacaaatggagatgaaagggttaaccatttatactaagagaaagctggaagtccttgcaaaaactatgtcatgggattttctatacactcccaataaatacagcctcttcagtcactatcccccacccgccyccaccaccctttaacaagcgttgtctgaggatcaagccaaaaactgggggctgttagaagctgggctagtcccaagcaaactgtgaagcagatgaaaataaatttgccaagtgcaccagcatagtcctcaccacatatctgccctcagcctccttccttcagtggtagtcatggagatgggggaacgagggcatattccttcccagcgctcggcatccaccccaaattccgcatccccgttgaactaacaacaggtaacagcacaaagtagggttcttccccaaagcggctgcattttaactcagattaaaactcaagcaaataacctgccagggagacttagacaaaagcttcagatgagggtggagaccatctgtgctccattccccagcatatccccagggcctgacacttaggaggaggtcaataaatatttgctaaatgaatacattagtgaatgacacggtaggaaacagcagagtgtggcctgctcttggrgctggtttgacaaggaaggattccagctatcagggagtggctgggcaggggcacagagctgcgcgctacacagtgatgagaacccttccaaaaagcctctcktctggcctgctttcctggcccttgccacacacacaaggtctgtggtgctggtggtgcccattccagtagtctgaagttcattccatcaatagcatcttacgcttagcctgagacccacgtagcagaaaaatctcaacttcagacaccgctgtgcgttttttggatagtgtttcagattggggtttttttgtgttgtttttggttcctttgctttttaaacagttccttgagctgctgacagagtagcccagtgtacatgggtggtcccaaaatgctttgcactatttggacctactctgttgtattacatgggtaacaagatcagaggaatttggatgtgtttaggttaggatttagatctggatactacatatagacctgcttttaattccctctttccttcttgtattatttaagtccatggacasttagaatcaatatataaacatctccaagaagcacaaaaagaagcagcatgtggaacgtgaggtcaaagctgtcagctcacatttcccctccccagaaaagcccggagattttgsagttcctcagtacatgtcttcagttggcttcaatgtcagtttgcttcttgttctttatataattgttgacttctttgaagttcattatagacatcactaagtcagatagtcccacattataagcagactcttctaattcttctgcagtgtgaatttgcttttcccatctgtgagatttccctgtgactggcccactgacagtcagttgcctgcatcagggaccgctgagtgtacagagctgcttctttccttcagagggaggctcagacctggagaggggaccacattcaaaagagccgattgttttcaagcattggagaagcagctccagaaaatccttgcctggcaacattggagaaatgcgctgatcttgtgtttttaccatagaagtggttggaaaggggaatttgctgctggttcctttcatcttgatggtggttgcttttcttggataaagtcacaaaattcttctgaaactagaaattgtgacccttgatattaaaaaggtatataagggctctaattttttcaaacctactatggggtgacaaaatccatttactgaaggtattaagactgcagataatatttctgctgaataagaagcagtgtggactaatgggaagagacacaacatattcttctccagtttctcrtagtttcgatgctttcttgaaagtgcctgtgaggcaaagatgcatgaagacatgttctgctttttgctgtttttttgtgtttttttggtaacatagaaagttaggtcatagacctgggccatggacctgtgtaagtatttaagacatttggacatattttgtatctgtaacttcccttccctttttaaaaagttctctaaactagaaatggtgtagatatggaatcaactgtgaaactatccttctctggcagctccaaaatcctttacattttttcctggctgggtgacacgattttaaccctaactgaatgggccaatctttggccttttctacaagttctcaaattcaagggcagagagtctagtggacctggatacttgtaccgggttaaatggacttatcagtgaggtattatctagctttaaccttcacaagatggacacatggcttaaaaagcctcctctgaagaaaccatgggttaaagatagactaataacacaggccacccaaaaaaccaaactgacaaaaacagcaaaggtagcacttctgctccccttcccaaaagctctttgccagacaccattacaagaaagaaagactgatgatctgatgtgccaagcagctggccaaaacaaagaaacaaaaaacccttcaaaattataaaaatctaactaggacacagggatgaaaaatctacatctataattgttatcatatatcttacactcaaagtatattttgcgccttggactattaagtaatgataatggcctgtgtagataatttattaggtcccaaataaataatgaataaaatagagcatggggtgggggtgtatgttcaaaatgcttggaacctactgcttagggaatgtcattgactaaggttgatgttcaaaagtaggggtggtggcctcagaggacaaacctgcctgcaaacaaagtctgaatggatgatagaagccacrgataagagggaaagaacttggaggacatactgtacaaatcagaaggacaggaaatctccttgtctttctatagatacacagaactaaggaaggatccagggaaagtagacacaaactcaacaaagcaacaaggtccatccaagatctggttccagagctgactgggcattccaggtcacttgacagatggtggtaggagatgcattcgtgggacctgggtggtgtacatcacccaggctggcctctccaacctgccctcagtgcagtccaacattgagaacacaggcaaaggtggagagtgggttttgactcaagcttttggcctcttgcatttaatcatccaagtgtggcctttcccagttaaggcaaacaaaccttagagttctcgtcacttttcaaggtttctggaaagaaaaggcctatgagctcttgccaaggcggctgcattcagttgtcagttgtgcaggttttgctttgcrgaaaggcttccagaagggctggtccatctggaggggacacgtttttctaactcacacaaagacatctatgttgactggccttggccagggccttgtggtaaattttggcagaatagagccaaaaccagaaaaagagattcagtggagaaaaccctaaattggatgaatttttacttttcaacccataatatggcttctgtaggccctgatgaaatcagtacatgttattggagaagycactgagtaggttagtaggttgtgtaagtcctggctagtagattcggtgttgttagagaagccacttggagtcagattggatggtggagaggagctgatgtgaaaatgtttgcaattaccaggctctgagactgcagggatttggagaaaaagcacatcagttttgttttgtgaccaggactttttgagttgttgcasaaatgctgtttgtttgcagaaactcaggagccctgtacttcttactcattacctgctgccactctcccaaacacaccggtgttgggatcctccccttccccaactggcaaagaaggaaagggttctttgtgactcaggctaggaagtgacaggagagctcactagaggctgaggggtgccatctccatttacaaagctgatagcaaagtaatcaaacctagcagcaccaagagcctggggcagctccttggcagcgctctccaccacattgtgtgctctgggtcgcacagggcctgtaaattgcacagtaatggctgggtccacagcaggaataaacatgtgctttgaattttccaaatgagtcagacgcacgctgcragataaatgctgatagcaagcagatgtgacatgtgcttttcaagaggatggatggggggaattggggattggcatcttctacactctttgagtcaatggactgacacctaatgggacctggtcttttaacaagaaacattgggtgatgggtgacattttccccacttctttctttccgtaagaggaatctacattttaagtctcaaatgtaaacgtgctctggytccaatttgtyggctgactctaatcgcctcggaacttatataaactctaggtgagtaatttccccaagtacagtaccctcttggaatgcatgagctgtgaactcagattaaacttttaacctcacatttttctgggaaggattattatccctgtttctatcgtttgaaaaggccatcagaaactccaaaaggtccagtgctcgcaggggttgagttagtacactctctcaagagcctgtcccctgtgctgagtatgcctggcctccyaaaaatgggatgagagggtctgttgtgccagaattaaaactacaaggcaccaactctcttgccttcctcataacactctcaactaaatgtgcagtttggagggccctgtgccctcccagctcaactgcaaaagccctgagtgtctttgctgatgcatgccatgtgccagttgccaagcaacatacataacacattcatcagcagagcgtgaggtctgagtcctaaatttctgctgcattcttccacacttggctttcattcaccttgtctccttccagcaactggatcaacagatgttaggctttcccagagtgtttggcagaaccagtcccagatgccaagcttgaagatacaacatctctttgcaacctctaattsctatcactgtactcattaatcacttgctcaaacctttaactgagtccattaggacttcaataccaggtgttttttttgttttgttttgttttgtttttactgagttggcatcaacatggaaacaagtggactggtgtattctcccagaagcttctcattatttgtacttagtttctgtttgatcactaccaagaggcagctggcatggtgtcatgggaagaacagtaggcttgggagtcaagtggcgcttctgcggacaactcattatggagccttggccaagtcagtattttcgaaagggcctcagcttyttcttttataaagtgaagatattggactcagtggtcctcccgttgaaacaataataatcccattagttttactatgcagtttcaaagaaaagcagacaccaaagcaagaagcaaaaatgggaaaccttcaaggtcaaaagtttcagttcactgtattgaatgttgctctgcaatgtctttcgaatatgttttgatacaacattctgctgtaaacaccatgatgccattttcatgtggtattacatcacccaatggatatttttggattcttaaacgagaaacccactgttctagcactagaagaacaagggaggctgtgatagcatcattcccacttcmagccccctctggggttagaaaatggatcaaataattggttgctgatcttaaatttcctcagcattcatgtgtgtttacacccacactgaccccagtaccaggttgcctcccaccctcctttctggactcctgtcctctgtcctatggaacgacaaaacagaattgggcacaattttctctatttctgactttactcaattgcttttctggtgttggcctcatcaatggacaagctgctggaagttgactgagtataaaatgctataagggaaacattgtaggaaaaaaagcatcccattattcctgtctccaaaagcaagattggagattggggtcttctctaagacagacgccaccacctgcacccrggacctccagcaaccacctccacaaagcctatgtaaacagtgtaatgtgttttgatattaaccttgtaacaaacatcttaagtttccttcatgttggtgctggaacaggagtgttcaattactcactaattttgtagacatttgttgaacatctattaggcatctggaactgaggatacaaagataaacgtacatggcattgcctgaaaggaatttatgatctagcaaagggcacagacgtgtatatagtctgctggaatatattatgataagtgctacactggtggtgtggatgaaaggccacacgggcacagataggagctatgagttccgccaggatttcacttakctaaaagacaggcaaagggtattccaggcagaggaacatgcgtaggcagacgcagggcaacatgaaagtgcatggcagattcaaggaatgttgcaggtcggtgtgatgggatcatagattcatggtagagagtggcttgtttatatacagtttatgtacagttgttagaggtgggaagaagatttgactccgagctccctagataccaaagaaaaaagggaaatatgaaatttgctgtgcctccgagctccctagataccaaagaaaaaagggaaatatgaaatttgctgtgcctacatgagaaaagccaaatgctcgagagaaacaggcttcttctggaattaagagccaagggacacttctctgttgattctcttcagaggctcaagatgggatacagtggaaatatcttcaacaatatccccgcactagcaatttttataagactgtttcttgtaatgtccctcagtgcgagccaatggcatcttgccaaagtgtaattcagtaaaagcagctctacatgggaccagaacaattcagcctaagcctgctgttttttgatggtttggcttgatgtgtgaatacaacttagggtatctagaggaatggatgttcttcatatctttcaggcaatcatccatgaatattatttcttacaacagggctcttaaaaagcattaggtagcaggcaatgaacttgagcttctattcattggtgaagacctcaagaacaaaggagtctgaacattgggttatgtaacaaagaaaagaatcttttccaaagatgtttagtcatggaagagaagtaaccggtcattctggactaagtgcagtccaatggctcagctcaaaccggcctgcattagggctaggttgttaagtaaagtttcctgccctgacagcacatgtcttgctgtgaactctaggctggaagtgggcccataaaaggccctcacattttaggagtaaaactgtgggctaagcaccttttgagatttggccctttttccttagtagctgaagtaattgtgtgatgcacaaacctgggtccagaaagctgggacaagggtgtggcatttcaccaaatagcatctgaaatgggggctaaaagagagtgtaagtttcgccaaataccaaatcctacatatttatataacatggtataatttataaactatattcccatccagtatgtaatttaaattgcataaaaaccttgtacaggagtcgtgtgattatcacattatagatgggaaaactaaggcttgatcaagttagcatggatgttcggtgacaaaaccagaattgtaacccaggtcttttgattttagtgcagttattttttacctttcaaggttcaggcgagttatccagaagagtagtgaattgtaggtaatgatagccatgcccagcaggtaccaagctacagtagcacaagttgaaaaattacaaacactgtaggtagggaaggctttctgcagttaacttagaaaaaagcatccatttgattggcaagaatgctccaaggatgctctttgttcacggagagacaggcacagtctggttcctggatcccatgaatggccccaggtatacactggctagtagagacaatccaaagatttgttctttccaccctttatttaccaaacatgcaaagtatgatgccacgtatgaattgtggatgaggatattctcagcagaatgcgagattattttcacaatcattgtaggaactttaaataatcttacctgttgatattcaatagccagatcttcccaaaagtccttactcattgtaaataataaggataaacttgaactctaggttttaaagattgcctttctgagtgctatacttaagtaaaaataactattgccacctcctgccaacattttcattaaacatctaaaaaataacttggtgtgtggtggagaattggtggatatagactgttttctctggttccccctgaaaataccaagatgggagataaattcagacattgatagctctgctgccacagtgcactaaattataaactagtgtcccaaaagacaggattctcctcccaatcaacaagagtacttataaccagagagccataggtgctcagtatagaaccaaaacaacaacaacaacaaaaacccccaatttatagtcagggaggagattccggacctcagtaccataggtggacctggtaccacaacacatgtgtattcgctgaagaactgagacactttgatgcaattatttgccaaaggtttcaaaaagcaatccacccccaaattgtggagggtaaaatgttctttcctgttctcttctctgtttgcgcacacacagtaccactcaccgcattccagttggcacctgcacacactcctaaaataagagaatgtgtaatctcctgagtctcttttggctcaaagcattgagagttttcagagactgggtctacaagatgcaggaagctacacaccaatagccctcctcacgttaaggcgataggaataagaccccctgacagccaaatctgagactttggtttagaaaacccatcatttagaaatggctttgtaataaaaccggaaattcaggtttttgtaaaaaaagtaatagaaaaaaagagcggaccagttccccatgggcacacagctgcccacagctgctgcctggttacttcctgacagacatgggtttgctgctatgggaacgatgtctgtcccacaggcaaggagtrtccctgtgcccgtgtgcttgctgctaaacagtgacaaggacattaggaaaacagggccttcttaactcttgaggatgacagtgcatgcaccaaagaaaccaaaggagccgttgcctctgctatcatttttcttctttttttttcggagacggagtctcactttgtggcccaggctggagtgcagtgacacartctcggctcactgcaacctccccctcccaggttcaagcaattctcctgcctcatcctcccgagtagctgggactacaggcacacaccggcatgcctggctaattttcgtatttttagtagagatggattttaccctgttggccagtctggtctcgaactcccgacctcgggtgatctgcccaccttgcctcccaaagtgctgggattacaggcatgaaccactgtgcctgaccctctgttatctttttaatcttttaacacagaaatagttatttgctgaatgatccttagcccattgaactggtttaatggaacatacagcaacaacagaaagctaagtcccagacagtagtttctgctttggaagagtgtaactcamgtttgtcatcctgcctctttttcagaaatagctcgaaggaggagaggtatggcccatctttttgcttttatagcaaatcaacatttgggcagcacgatggcctcccttcccaggttttaggaacacctgaggcctgttcttgggaagtgcagctgtgattggtggggacctagccccctgctgggcaaagcacttctaggtcctgggaactgcctcggttgagatggcactgtgaaataagtctcagtgtgtttgctcaatgctttgtgttttgtttatttatgctttaatattaaagaaaaaattccatcagaaccttatctttagccttagattagaacaaaaattagaacaaaagtcactcatcagaaagctacagatgtagtttgtaaatccctcactggaaaatgaatttgcctttgtggccagatctgtgagtgtggtttgaccacgagaaagccgctaatgtttgttggttgggctcagagactactagcaacttttcagaagtactcttctgagttctgcaggcttgagtctgtgggtggtaccgagtaagcctgattctctcagggagtaggggaaagagagggattattctgaattagtggagaaagtccggggatgaccttatttgtgagtttgtggctggatttaagaagtccaaaaggggcttgttgttacagtatcttggagagttttcatttcagtatatatagtgctatatctttttttaaaaaaattgctgcacagtgggctgggctcggtggctcatgcatagtaatctcagcactttgggaggccgaggtgggcggaccatgaggtcaggagatcragaccakcctggttaacatggcgaaaccccgtctctactaaaaatacaaaaaattagccgagcatggtggcgggcgcctgtagtyccagctactcggaaggctgaggcaggagaatgacttgaacctgggaggcggagcttgcagtgagccgagatcgcagagcttgcagtgaacctagatcgtgccactatgctccagcctgggcgacagagcaagactccatctccaaaaaaaaaaaaaaattgctgcacagtattctatatcatggccgtgtgtgtgtgtgtgtgtctgtgtgtgtgtgtaatggacatttatttttttatatcccctacttttcaaaaattattttctaattctgcctgaaataacttcctttgcaaaattactttagctgaatgctatcaattataaatccmattgtatcaacaagctcatcttttccattgttaatattattcactgaattgtgaataatgtaactgggctgctttccttcccacacctgatgtagacactccacaggagagggagtgttgttataggaggaagaagtacttggagagaactggagaagggcaccatgtgagcacacttggacacaaggagagagggttccagagaaggaagagcagtgcagagttggaggcaggaagaccctaagatccacctcttcattgccaggattaccttcagttgtttcttcaacctcatctctgtttagtccatttctgtgacatgccagctctgggacctgggtggccacaggtagctcatgaaatgacttaagcattattaaaactggagtttacccaggaggctgaggtgggagtgagctgagttcgtgccatgcactcctgcttgggcaacagagcaagaccctgtctcaaaaaaacaaaatgaaacaaaaaatcctggagtttacaaacatcactgatgtgtggttggcatttggagagacccatgcgcatacagaaacttgacaagtgaatcgtttcataaagaggctgatagatgatcaggttagctgctactttaaagccagtgagcatgtgcagtaaccatggtgccacgttaattaagactaatggccaaaggagccattgcagatgatccaattaggcggatttagttagagattatacggataactctgactgaaacatcaatctaggcctctatttcaaatgaggtggtatttgactataataaaatagtatactaagtagctgatgtgtcttgcaattgtggaagttgagggctactaacagccttaaatattaatatttaagcttgattttctttcaagaaccaattatgtagatggtttattaccaagttctttttgttccttacccctcctgctgtctagttggggctgttttacagttcattagccccttgacaagaaggtagaaatgaaagaaggtgcagcttacatctgtctgcctactagccaattccgtaaactgttttgcggggaagatactgaaactataggccaaaacggacctttgtgttcccttccccatgcattaatttttcctagatcccaagtattggagagagctagcaattggctgaactgacaatttctcagttgcataaaaagtaatcagtggaattttgcttaatgtggtcccagttttgtcgtacataaggaaaaatattctgataagccccacaagctagtgaagcgtcttaaaattacacactgggttatacagtgattacactcatcaaaatgattttttgcctaactttaaattctctcaacaaagatcccaaattttcctagcgyacatatttatttttaagagttatgaaaatacacagccgtatatggttgtatctgaatccatgttgccgtgagagactgagcagttctcaagtattaagtgagaaatcatcgcagaaggattgcactatgtcattgacgccttcaaacatgtccaccatattttactggtggaaatttcatcattaggcttaaattggaagccactgattctctgccattaaaaaaaaaatggagttctagccattaagtatgattttcgtttaatttttttgatggggagatgagaaagaaggaatgaaagtataaagaaaagggaaaaggctagtagagggtgctgtcgtctgctaattttttgctttctctaaagcgcttctgctcactgccatatggtaaattcctcagtgaattattcagggtcttgtcctgatgcaaaagacactttaaaaaaaagcagaacattctttatccctcttggaaaaagaaataacaaataattaaggccacagcgctcagggacccaagtttattggcaataaaaggtagctgtgctgacaacgctaccaattaatctgccmaaagygagctcagtggtgttgccataaagatcatgtgttggaaaacaggactggagacatccagggatctatataaagcatagacaacagtcttagcgatcatggggcagcaatgtgggcmccctaccttcagcagatatggtagcggtctgcgttctttctgtaacaaaactcctcactacgtggagaacccctcaatcccaagtcagctgtacacctggcctcttcagaagctatgtgtgcccagaaggtgctggtgggaacagaaaaaaaaaattgaaatcaaattttattttttgagacctatggaaactaggttgcttatacttgaggaatatttgaggaagtataagcaacttagtttccgtaagtgagaaaactgaggctctcagcttccaaattcaggtctgcctggttcccatatccattcttttcctgtaatatatgtttccagatgaagcatcaagaaatgttctaaacctggctgctatgaatgtgtggtgtgaccttgagcaagtcacctaacttctctgagccttgggtttgtatctgaagggtgagaggttagagactctgaggtctccaatggcagtgcttctccaatgttaatggacataggaatcacctggggatcttgttaaaatgcagattctgattcagtaggtctggggacaggcttgaggttgtacatctgagaatattccagataatgctgatgccactagtccacagacagtactttgagtagcaaggtcttgtagcattatcattctagggttccaagatggcagtgaccacgttttagtcttccagtcacccctgcmtgcccatgtatggttacaacatgacttgtacagttggtgctcaacaatgttcaatacattggatttaggtagtaaagaataagtagttcaaagggacataatctaagggaagtttgtagctcaggaagctcaataattctgtaatttcctgaaggcaccatccctcaagggtcaaactgaagcctagccttctcccccacccacaaaaggtaccctgataatcctaacttttcccacagtggatttatccacccctactgtatccccagctcactctgactgacttaatctgaaatcagatcaaccttaaaggacatctggtaaatgccattaggtagcactttactctcccaaagattttattttgtagattaaatcacatctcccctagayacattctgacatataaagtttcttcctccattctgacacccctctttgttctggtaaccagtatcagcattttactaattttctgtggtatttccatcctttcttccatgtatgtactttgctgttcttagaatggttgcagaggccagaagccagattttcattatctctatggggaaacattccataaactcaagacaaaaaatataccatgaattgaaaaaacggaaataattagccactaaaatctcttttctttctgtctttaaaaaaatttccatttttggccaggcacggtggctcatgcctgtaatcccagcactttgggaggccaagrtgggtggatcacgaggtcaggagttcgagaccagcctaaccaacatggtgaaaccccatttctactaaaaatacaaaaattagcttggtgtggtggtgtgtgcctgtaatcccagctactcaggaagctgaggcaggagaatcgcttgagcccgggaggtggaggttgcagtgagccgagatcgcaccactgaacgccagcctgggcaacagagcgagactctgtctcaaaaaaaaaaaaaaaaaaaaaaaatcccattttaaaccacttgtttagagttgggtctaattagagtactttagaaataaaggctatgttgtgcctgtaaagaagtggatgctatttttttaacctgatctttcttataatgcccaaaaggacaacactacgtattttcatatgactgtcaagggacagagtcagttccarctatttgacctagataaacagattaccattcacttcatctgaaagtacagggataattaacttggacaaccatgtaaacagcaggggtctcctccagagttctgccttcttaaatcagcagatatccttctagagagctgccacagcaaggccatttactgtgattgcsttttattgctgtattttaagttgttctcatgaactgtatggtgatatggaaagaacttctaggcatttcagtcttcttaggcttattcctatgtcccagcctatctgtgcttatccatttggtaaggtttatgatggatttgttctcctgagttcaacaaaatgtttttattcmttctgcaaagttggtaattagtccatgacaaaccattgagcccctagaatcaaagacacctggaatcacagttacacaggaccttaaaggtcatggagtccagttccctgtgtcttgtgccgacctccttctacagaatctctgaccaacggggtttcactctagcttacgtgcacagcattcagcagtaggttgcacattcttttaactgtgcctcctactccctgctcaaagagttctctttttaggttgagctgaaattcaattttctctagttcccacctttaatagcaatgcagggaaaacaaaataacttcctcttacacgtggcagtccttcatctatctgcaggtaacaaccacacctccctgagcctcctgttcttcatgtccttttccagctgtctttatgtcaaacattagactcctctctatcctggtcacactccagccttcctcaagttagtggcccggaatgggtaccatcctccaggtgaggtggactagcattctggagcagttgttctcaaccttggctgcacactgcgatccgctggatgcatgcctgggacccacaagcagagaccctgatataacagacctggaatgtggtctaagcatcaagatttataaaagcttcttgggtatgtcgattgtagccaagattcagaaccactgatgtggtttgtctgtgtccccacccaaatctcatcttgaattgtagctcccataattcccacatgttgtaggagggacccagtgggagataattggatcatgggggcggtttccccratactgttctcatggaaatgaataagtctcatgaaatctgatggttttataaggggaaacccctttttgcttggttctcattctctctttgcctgccaccatgtaagatgtgactttgctcctccttcactttctgccatgattgtgaggtctccccagccatgtggaactgtgagtcaattatacctctttcctttctttcctttataaattatccagtctcgggtatgtctgtattagcagcctgagaatggactaatacaaccactgttctggattctttactaatcagaggcgttgatggatacccaggtagagtgtggagaaggagtgggtagggggcagttaggggagatgggaggttacaacctattgttgaatggatagatctctccgtaagctaaaactcatggttgtttcttggtttttagtttttatcttgatttttgttttacgtttatacaaaaccaatataatcgtaacttaagttccacagctagggtagctaaactcatcttttatcatgtttctggcaggtattattgtattttgtcctctgggactttatgatgagacatacggggagttgggcacatacatctccctcctgagacctcactccctcctcacctccatctcattgcatattaacagcaccaaatcactractcatactgaataggctactcactcaaactcttactcatgctactactaagccattactctcgtcttatgttctggcaattttaatttaaaaaattaaattaaattatgttctggcttttttaatttaaaaaattcacctttaattctgataaaggcccaaatgagaggatatgggttgggtatgccacaagaatgaacttcccagtcctggactccagattagacagacttgcccacacagtacaggcagtcctggaaaaygacagagtcccgttgggggaattgcsttgtaaaatggacagcatggaggtgcaggccagaatgcatgctctttgcctgyagatgacaccccaaaaaatcattgcatttttaaaggattctgaatgatcacaacacacaaaaaaagaaatgataaatgtctgaggtgatgctcaatactataatttgatcattacacaatgtatacatggatagaaacatcacattgtgctcatgaatatgtacaattattatgtgtcacttaaaacaaaatttaaaaataacatttgcttgaatcagcaaaaaggagaaaagaagcaggcacttactatacactggcccactttgtgccacctatactgtattcactgtaaatgcataatttcatttaatctatacaataatcctataatgtggctgtaatgatgcccatactacacattaagaaaccagggctcggggggattagtgctaataagtggagtgtccagatagaaacttgagcctaagstaagcagggacttcattcctgttgaatttcattatattgggtttgctccagagttccagcctttcaaagtcgttttcaatcctgttttttcaggtcatgtatttgcgaggttaggaaaacctactctgttgtgatgagatgcagaacacttagaagacactcttcttgcctacaagtaaatttactatataaagtagtaagaccacatatctgtgaagctaattatattcttgattctgggcatgaaaagcagaaagaaaaagggattttttttccatctgtatctgatttatacarggactccctaacttaacacaggaagggtgaattattaggcagattttgataatttaaagacacagtttgccctagaaataatgtttttcactggtaatcagatcatctggccatctgcaatgcctgtttgacccacagtatacctggtatgtgctagtaaaaatactgttccaactccgycatgggtgtgttgcagatgactatagcagggcaggtcctagtaatgcttctgtctccyccatggttgcagtaastcttttttttaagtctgtaagagatcacagatctgcttacttgtttaacatgccccaataatgagttcttggcatttgtaaatccagtcattattttcctgatgagaggtgagcttttwaaaaaaaaaatccttcagcaacttgctttattttacttgaaactatgtatatcatagggatakatctccatgctactgcatatgaatttattgttttatctactgcacagaatttcagaccatgatgccccgtgatttatacaataatttccctttggatggacattaaaagtttccattttttccttcaygacaagtaatgttttagtgaatattctcattcatatacctttgtactgttggaatatttcagaagaatttatttctataactgaaattgacatatcaaagaatatatacacttaaaattttggttgccctccaaaaaggttataacaacttatattcccaccaaaatgtgtggtaaatagggattatcattttgttttcattggcatttcctttattattattattttaattgacacataatacttttacttattgatggggtacagtgtgatattttgatacatgtatgcagtgtataatgatcaaatcatggtaattagcatattcatcacctcaagtatttatcatttctttatgttgacgtgaacagaaaccacatcaaattttagaactgcagaacccttgagatttcaatatccctcttctctcctgccagtttcatgccagacattgaaaacttgggttttagagcagaagtatgtctcaatacaattgactcttgcagaaactccttcctatgtaaatagccatttctgcacttttcttcacctgccttgcaatgcaaggagttccttccagtacttaccttgctttctctgagcctggttctgtttgctttgacatttatagaaggctcaacttcttctctcagcacttttgacattctgtggctctttgggaaagggttcataaaaaatggaattaacatctatggaaataatatatggctctccagatagaaccactcatcaggggccggttgcctagggaactggaagagaaccatgtgggaggctccacacaagaccctgtacctctttctttctgccgtctctcacttttgtctactctacgttctcatgcaaacttacgtactctgcctgagttgaaagctgaggcctgtgcagatgaggtctctaagaacgtaaagacattcccaaatttcaaacttgatttctgatgtacagctcacttctttccgtcacatccatattatcactggggcatgatcagaaacttcatggcaggggcccacctggaacccacacccctagagatgcaggagaagacatcctgcaagcgtgtgtgtgtgagtgtgtgtatgtgagtgtgtgtaattaaatgtgtgtacatgtggaattcaaatgaatgctgcattaatcatcgacacaaatttggggtacttcctgtgttaggcaccgttgatgaaaagataccattcttgtccctattacaatgactgatgattagcatgatgggatggcattcaagtgcagtaggtgtttagaagagggaacccctgagaactcacacttcacagaggagtgtgagttttgagatgggttatagaggaagagtacaatttagccaggcaaggaggtaggggaaagtgtaccagtcagagggaaaagcatattacacaagggagggaagagccagcataatgtgctctgcaagctgccagtactctgaagctgcactgaggaatgcggaaagatgacggtaaagagtaagctagtggttccatcatgaaggcctcatatgccatgctatgaattttgttttatactctaggcaaagggaaactactgaaaaatttcaggctgttgaaaagacactgccggacctattgggcaccaatgctgaggcatatgtgctaaaaataatgcaaatcagagggaagtaggattctttcttcatcattggaaaaaaaaaataaagctcttacctcagctttgggtagaaatctttgctttcctccggaaatacagcttcatcttctcctttgtggtttttgtgctggtgctttcttaatctggtcttgcaagcaaagctaccagatggctttcgtcctgcgcactgtcccagccatgctcacatgtcgggttgatgaatgaactcctcccttattcatctgacctttgcatcaccaccttcctgactgggcaacttyggctttctcgaccgaaccatcatgcatgaagatttgcaagcccctgtgggagcagaccactttactctaaatcacttgtcagaagcaccgagaggccactacttrgtggaacaatagaaacagtttttatattttgggctttgactggaataaattgtgatcacactgaagttaggtctttctctctactctttgttccttttacttcttcctttttccctttgtcattctcctctattttcttcacttttccaaaacttttagttgcatggacctgctttggagtaaacagacctttctgcttgttagaactttttctcccggctgggtgcagtgggtcacatttgtaatcccggcattttgggagaccgagatgggaggattgcttgagtctaggagtttgagaccagcctgggtaatatagtgagaccccatctgtacaaaaaataaaaaaataaattagctggatatggtggcatgtgcctgtggtcccagctacttgggaggctgaggtgggaggaccacttgagcctaggaggtcaaggcttcagtgagctgtgatcactcctccgtactccagcctaggtgacagagcaagaccctgtctcaaagaaaaaaaaaaacaaaaacaaaaccttcttttcctaataaaaggagataaaaagattgcaccatccctccagccttagtcgaccagagtgcaccctgcgttggggagggcatggttgccagaaaccaccctgtgcatttccaccggcgtggctcaatcctcacccaaggccattcaggattatggctggcagtttgggtgtgaagttcttgagggcactggtggaaagaaagaactgggaagaaaaagaactgctgagaatgagggggatggcagagcaaagcaggtacttggggaaaagaaggaaggagatgtaagaatggaggggagaacaatctaggaatagaaaggaaaaggggaaataaattgggaagaagtacaccatgtagagaagaagggtcttgaaaggacaagataaaacatggttctcctagtagaccctttggcactgatggagacctcacggagagcacaataggctatgggtaaggagctagatatctacctacaacttttactagcaattgccaagaaatggattgcaaagtcctcctgataaggccctggaggtcgagaattgggtgctgtttgcttcattctttctccctcagtggccacaccctgtgggcctctgtgttggctgaaaaacccgtgccaattgcatcggacgtttcagttcaccgaaacacaaaagaatggaagaatagtctccatgtcctggccgctgttccttgcagctattttccctaaacagtggagcaacttaaaatagccatccttctgtctacttttatttatgacggtttttgtgtttaattcacaacttcttctgatgtgccctcagctctgtgcagcctggccagcgctgtgcagggtgccctccaggaagagcgccaggcagttgaaaacttctgccaacactgggaaatgtgttggctgcccgggagattccacccacaagtaactgcagtggtatttttttaaatgtctctgttggggcacaggcaggactgagtctcaactgggcagcagcagggggtatcctttctcattgatcagtgccagagcgtttgttaaatttttggattatcacccgtggatagtgggttagggctgaagatgtgcacaattctatattctctttttggttgagttggtatttgggatgtgggttgtttcaatgtccagatgaaaccacagctttctcagtggggaaggagttaaagccccaacccgccccgccaccctatttcccccagccccactcctcaccaggttccagcccaggagtgagtgcttcctaagcacccagctggtggtgtccttctgatccaggccctgtctttcttgggccgctcatcagcttttgtctctttggatggcaagtgctccmagctcaggctctgaatagacaaaggattaaaagctttggaaataaaaaataggtcttcaaagctgccagcaatggccaaggattccctccagtgcagcagggtccaacaacccagcccagcgcacttctcccaaatgttttgggaggctcctttcctttgagcaacaaggcctgtgttgtctgtgggtctcatacttggaggccgaagaataagcattgctggaaggggcgagaaaggtggcttctgtgctgcccaagacaccgcagattgcaggggatacgcctgtaactggcatatcccagcgcacactgttagatctagccagggaatgcaagcttgctgggggttccagtcctaattmctacgggttctttatgagtttcaggcggcagcctgaccaatgggcatcagacccctcgggctcacacgtgccgggagcatcatgctgctggtttctcttctgccatctggaagccatttgcattgaaatggtttcagccgcttgctgagcactgggttttacaggagtcacagcacagggcagcccaggtcccaggagccaagagccttcacttcctgtaggatttccagtttaaaacccactgaagctctgccctccagggcaccaccaggtcctccgtcccctcttccctttcctccccttttggaccccaagagcaatgacacgtgcaggggaaccctgacatctatccttcttctatttcttaccaactttgtaggttggaagggaaggggtgcagaaaagtccctttataaaaaacgcttcaggcaagagctcgtactttacattctctgctgcatgcattttgtaaaatgcagtatctcaggagagctctgaggactcacactcaagcctctagccatctaatttcatgataatcataggtgcctgttaccgtgcctgacactgtgctagggtctctatttgccttactctaatccttagaataaccctgcagagaaagacgagagtcttgggttaagcagctaataaaagaaatgtaggattctcatcaaggtctttgccattccaaagctctttctgctctagaaactcgtgtccccatttaggcctaagcagggtgggagctccccaargacagagaagcaaaggaagaacaracatctgcagttcacactagatagtccagtcatgggttttttaaggaagcaaaatgatcttttgaaaggaaactcatgcagtctgtccgcttcttgccaactctactacagtgcaacgtgccaaaaacagccaaaccttgtttgaggtatgaaagcagctgttataataaactcctctgctctacctcttttcctgttatggtggaatggctgtttaaagtaaatgtctccaatccatggattttctggggtcatgaaaacattgtttaattggcagactgtattacattttttggtgaagttaggaagtaaacagaatgccacacgccatgttagatccatgcagtgtaaaggtctgtaaggaaacggtccctggattctggagccattattccccacttcccacccccyggggtggaccagccttctcaggttttgaggttgttccagaaagaatggatttctgcctctcttctatcccaggacttccaaagcagagcaaggggaaattagtgcacggaatggagtcgatctgggtttgaatcctctctctgccagtcactaatgtggaacttcaggtaaattactctgagcctccatcttggaatctgtaagatggatatggtaataactacccaattgccttcatcataaaatttaaaacaaaatcaaaattataacatatattgctgtagttcttagtatagaccctgtgccgttcaggtgttttacaggcattaattcatttaatctcctcaacractttatgaggcagatactgttctaaccatcttctagcctctggggagacaatgggcagttcaaccaacaaagatctctgcctgcatggaactcacattcttgttagggaggccaacagataagtaaaatacataagtaaatgaaatggtgataagtgctatgaagaaaaataaacagagctaagtgtggtcgtgcacgcctgtggtcctacctactcaggaggctgaggtgggaggctcgcttgagcccaggagtttgaggctgcagtgagctatgagtgcacctaggaatagccactgcactccagcctgggcaacataatgagactccatagctaaataaatacataaaataaacaagaaagggagatggaggcrtgggggaggaggattgcatttttcaaaagaatggtcagggaaggcctctctgagaagatgatgtttttaagtaaaaacccgaaaaaagggagaaagccatgagggtacccacaggagagtgtcctaggcagaggaaacggcccatgcaaaggccttgtggtggcaggcctggtgtgttcgaggcctggtgaggaggccagcatggctggagtcgaaacagcaaggcaggcagctttggaggcagacagtgtagggcctcatgaacctcagctctttctctcaggagaggagaagctcccagaagagcttgagcagaggagggacttgacccagatgaaactaggtgtgaggaaggacacttctatttgtgcactgcagctgctgctcctgctgctggttcccatgagaacagttgccaacttttccagactaagtaggacayttcttaatgggacatctgggcctccactgtcgacattgtacttgttgattttaacaacagatgaactttccccaacttcccatgtatctgtgtccagcctcctccctccttttgggtggttctgtcctttgccactgctctgcactggatcgtcttgatgatgctacttaactggctacatagacagctgcggtctgaactcaccatgcataacgtgttgctgtcttgagttagttattggggccagtggctcacagataagtattgcttgggccaggaaaccacaagaatgaatggggaagaagggtgagggaaatgtttataaacagaattgccccctcagtggagactatgaagcctattagtataacaagccgccccaaaacttgctagtctatacaaattctggtgggaaaaattaggatatcctcatacttcctatgggaggccaggtatcacaagttccgagcctcaggcctacaggtggtttctagagcccatggatctcctgaaatcatgcccaaacatatgcctgtgggtgattttcaggggcgaggtcatagtttccatgtggcttgttctttgaatggcttgaatggcttgattgcaattgcargtcatactttcaacactggctggtgtgttactgtatgtgcaaacgtgaaaaaatgtatgtatttcaaaacagagtttaaaaggatcttttaattccctaatattaaaagtccataatatctgtatttgacaaatatggtgttatcagtatagaaagataaattatggtctcttagaaattaagggatgtgtttttgaggacatcgaggtgtactgtctcccaagctctgtttgccgcttttctcaatggctttaaatcatcaggaattcactctctgtattagatcayttattctyatatgccgctcgctgcctttgaaatacctccaattctagcaatggtttacagacatgcacawgagccaagtggcttaaagcaacaccctaggacttaggtgtttggaagccccttatcccctggagtcatttgtggaacagggcctgcatgcaagaggaggcccaagctcagaaatgagcaaagagcatgacttaacagggaggttgtagcgtcttcacagcagagtacagtgaatagaattacatgttcctcaagtcccattggctcatattggcatcattcggtactggacacagggtgtgcaccaagtatatctgtgagtcaatgctcacctgcagatgtaccacgaagcataccagacagaattcttggggggaggtggggggctgctgcttctcccaggccctggggttctatcacaatatttgattctacccggttcagataagcccttacggggattcttagctgggacttacagaaattgacaacgagatttgttaggaatgactgatcccatgccctggaatgtaagccatgcacagtttatggtacataattatatacaataaactataaaggacatacagtggattttgatatcrggttccagttcctcctcactgaggaattagtacaaacccttcatctgtgtggctaasgaaatagttctggtcctgcccgaatccgtttccatgtgtccacatggccctttttccccaccatgtacttctgacgggagaggtctgctccttacattaggatcgaaagcctcgtgggagaagttgcaaggtgttccctttccagcggtcactgtggaggaaaaaaggataaccgtatgactgtcagagacgtgatcaaataggatgagcttacattggataagtagacaaaatacaaaatcagcaataagattatgacacagaaatctgtgtatttgttcctcaattgcatacaaatttcccatttttcatcaagatggaaattgaataagaggaaaactaagaggctcttatcacagatgagcttgtgttccagttcaccatggctaccatcagagttttgtcctggtcacaggcagctgtagtctgtgttactctctaactagaatacacacatccctcagagggattcattgccttttgccacagagctgtagtctctgtttcctttgaagatggggggaaggtttaacacatttgtccagaagcactcttctgctggaatatgggactacatgtggatcccctcttcctgagtcatcatgacamttcctgtgtcacagcgttaaatgtccccttggcagaatgttctaggtacacccttgaattactaaatgttctattttgtgtgaatcatattatcctgtgtcagttaaacaacactcttttgggcgggcatggtggctcatgttgtaatcccagyactttgggaggccraggcaggtggatcgcttgagctcaggagtttgagaccagccggggcaatatggtgaaaccccatttctacaaaaaatacaaaaattagctgggcctggtggtgcacacatgtagtcccagctactgaggaggctacggtgggagaattgcttgagcccaggagtttgaggctgcagtgagccaagatcacgccactgcactctagcctgggtgacagagcaagaccctgtctcaaaaaacaaacaaacaaaaaacactctttcagttataccctccaaaatgatatgggaaattattttgcccctacttctgcaccaacttcaagggtttggattgcctgctcccagctttgtctcagtgacttcaggactctggtgcttgatttaatagaaatgagacaatacaataaaaattaatggaaccagtttggtcttttcaatctattacctattttgtgtttcgagaggggaattgagactggaggagaactgtggaatgcatttaccaaagaaggctttcactgtctaaacgtagtgtccctgaatggggggaggtgggataggcgggtggggtcgtagtgtctggttcacagtgttggtactgcacaaaggcacctgagggaagaatragagcagaagtccagctccactctgcagaccaagtgtgcagatataaaacctttgcaggaatcascacagtgcctgcatcagaactcacgtacttgatcgattctgccctggatatccaagtaatgttactgctgtgcygatgactgctgtgcagatgttagtttcataccgcagtttgtttcccctcactctcttgaacctgttctttattaggaacagaaagagtttgtgtcctctctaggtcccagtgagcaaagcacagatcctttgcctcaggctctcgcagcttgtcaggacacaagttacccgctggcagggacattcctacaatcaactgtcacaaggcctgttactgcttattttcatttccctgttgccgcagctcccctttctcctgttctgtctagataatcagaagattttcttctctttctttaaaaaaaaattgtttctatcccctactctgtgatcctttccatcctaccctaggcctgtgcagcagaaacctttgaaagaaggggtcctccctgcaccccagggccctcctggagtcctggcttttccagctccacttggataaacatttctcttccgtgatttgtgcccagttgcggcgtgtctgggaagtgagcaggagtagaaacagatggatcttccacgggctcaaagtcaagaagattgacttctatgcagtagtcctctggatamagcttagtaaacatataatcacaccatcatctggggctctgtataccctagtaaatgagtgcttctaattttataagcactgtcattaccacagttctacatgagatttttcctttgactgtagtatatgttcttttgctttactaggtgttgtttattaggtgttgtttcccccaagtactgtagaaagtgacagattgtttcagggcaaccagtaggttgtatttacaggtggttggctgtcttgaccagctttgctgcaataacataactgctttccagcaggaaggaacattgcatagtagtgagggctgtgaagtccagacttcattgtattcttcatttaggaacgaacattttctgaatcactgaatccttctttttcagttcctcttcaggtctgtgcataatgggaaggtgatgaatgagccctgtcttggtgcatgacaaagatgcaaaaatggcattcctagtccatcatcagcaggacctgagcttctagttgcttttccagagtagggttgagaggcctggctgccccaggcaggaagagctctggctaggcaccatttagaaggggtatgcctcctagatccatcaagctgagaccatccctgggatcccgttgtgtggtggacctctcaagacaagtatctcttcttaatggaagggtctctcttaccacaggctgttttaaagaataataagcaatgaactcacagtgtgttctaaaccgcatgcagtgtactgggagtttatgtaaacaaatatatgctgcaaattaaaaayaaaatgtatgagtgaatccctagtgggtgattctggtactaattccaaattccatattcaccggggaagtggggaacaccttcagcaaagtgcggattggacagtgttgttaagtcctcacccaaagccgcttcttctttaagcccgtttaaccagtttacaactgtaattaggagctgtttggccatcggggaaataaaattcrtttctttgggcatgaaatacaatgaagtgattataccataaaaatttcatatcatatgaaattatatatgtattttctgcatctctgatctccattattcacttgtttccagagctggtgtgctcctggtcacattttctgattctctgctgtaagagctgaagttcaaaaggccttctgcctgcactgtgaatggctcagctggtagaatctgattttttcctattttgatttctgagtctgctgcttttacagtcatttatgcatctcatgaatgtaatgaagtgttgctttcctctgaactcttgtatttttttctgccttgtaggtcgggttttaatccctgcatgattttgagaggtaaacagaatatcttccagatsggggttgctcttcataatcctttcctcggtggtgattcctccatctgaatccaaatgtgtcctccatagctgcctgtcctaggctgattcaccagggctccacatcttgactttgctatgccacctcatttccacgtgagaaggaagtgcacgttcagggtggttggtcagagttaagtcagcctgtatccgtggggtgaaattaacagacatgtgggaattgaaccttaaacattctcagtttcactaggaacctaaaattataatcacgccacagagattgtaaatttgaaatttaccttgtttccatggaaattttgaattcaaaacatttaatgtgtaaaatatcactagtaagagggcacatagcattgggagatatacctaatgctagatgacacgttagtgggtgcagcgcaccagcatggcacatgtatacatatgtaactaacctgcacaatgtgcacatgtaccctaaaacttaaagtataataaaaaaaaaaaacattattccaaaaaaaaataaaaataaaaataaaaataaaaataaaaaaaaataaaaaaaaaaagatctgtatcacctccggggaaggaaaggaacgatgcttcatgtccaagcttggtggtgccagtgatcctgaacttctcaagtaattagtctatatggacagattagttctttacttgtttaaatgcaatggatcagttgcattaagtggtatgtgctctttacttgtttaaatgcaatggatcagttgcattaagtggtatgtgcattgagtggtaggctggcaaatggtaagggcrctgagtggaatgctggcaaatgtttaacagccggctctccagaaggcaaaagccctgatttggagctttttgctgatttcaatggtgtgaatacttccagcatgaccaatttcatgctaccaatataaagtcactgaacatagagttgtgaagagataacaacaattgggggtcaccagtcagtataagctggctccagtcacgcccatgataaacccatgggaaattgtgatttttgaattttttttgttttgtttttgtgttttgttttgttttgtttttgagacggagtctcgctctgttgcccaggctggagtgcagtgacgtgatctcggctcactgcaagctccgcctcccgggttcacgccattctcctgcctcagcctcagaagtagctgggactacaggcgcccgccaccacgcccggctaatttttttgtattttttagtggagacggggtttcaccrtgttagccaggmtggtctcgatctcctgacctcrtgatccgcccaccttggcctcccaaagttctgggattacaggcctgagccaccgcgcccggccttgttttgtttttgacagtctctgtctatcacccaggctggagagtactggtgggatttcggctcactgcaacctctgcctcccaggatcgagcgattcttctgcctcagccasccaagtagctgggactacaggcrtgtgccactatgctcagctaattttttgtgtttttagtagagataaggttttaccatattggccaggctggtctcaaactcctgacctcaagtgatccacccaccttggcctcccaaaatgttgggattacagacatgagccactgtgcctggtgattttgaattttgctttagaaatccttttctacaaacatctctagtgtctgaagaaagtcactttgtgtgtgtgtrtacaaacgtatgttcccatctagttatttcagttttaaacaattttctaaatttaactgtcatttctaaactccatataaaggcatggaaaattaaatargcctacatgttcccatttattttatatgccataattcattgcatgccttctgactttttgtttaatggtttttcatttttatttccagtttcattgctttgacttccaaaagtatagctgtctgccccatgaaaatatttctctccccatccccctttgtctagttttgttttgttttgttttgttttggtagagacagcatctcactgtgttgccctggccagtcttgaactcgtggcctcagggatcctcttgcctcaccctcccaaagtgctgggattacaggcatgggccacgacaccaggcctttgtccagttttaataacaagtatgtggctagtgacagggatggtcgtcattccgtctggggccactctcccctcacaggcktcgtgggccaatactctattaaaataggtccctcccagttccctccttgttttgccaacttttcctcatttggatcatttcaagtcgattgactcatttctcattaggttcaagactgaggccacattcaatgtggaacagaatgactgttttaaaacagcagtggtgaagtctcctgctctgtcttggcttcgttcccttaattttaagtgtcttcgactatcatcttcacttgaagaaagtaaaaaacacatgtttttgaggaacgaggaatgtctgtcaggttgattgatgttttcatttacattgaagtccactttttttccccatcaaaacactagttttggtggttaaaaaaaaaatcaaatcggtatgtgagggagagtggatgtaggcatgtctttgccagcacctgctcagcagcataattttcacatgccccgacactgtgtcgttgacaaacagcaaatatcttgtcattaactgagatttgtcctgctcagcgctgttccccctcgtcattatattagtccttcagctgcccccaaatgacactttgtaaagcagccacactcaaggcaagtgttggattgcaggtttacagttctcatcttggccctatcacatggagttttgaaagtgccgagacccacaaaatggagaaatgctgtagggtcttgggactcacttcagtctgggcaggggtctgaaggcatgttttgcattcctttcatcataaccttcattccaccctctacctccagcgggtttgaggctgcggctccctgtggcatcagccttggctgtgtgggaggaaagggctctcatcagtgtcagtgttttaactgtcaggcccctgagctgtgcccctctcccaggacatccataccccggcccacaggacagtgagatcagcaaatcacctagaagactggagacaaaggtgggagaggagattgtgaaatcccttgcacctgacagcagattccaatttgggggcagggagattgctcctggaagcgagggcccacttcccactgcccggatctgtactccagtcatgcctttgttaagccgcaggatgtgccgagtactagcgggtgctcctttgcttagggaaatgcaaacgcaacacagcagaaaaacaaaaccctcatgcctgtacaaggaggtagctatgaagatcatggggagtgtggatgtgtgcagtatcaactacacaggtgcttagggattcaaggcaaattaggaaagggtgcattgaggaggaaatctgtgagtaagcacaaaggaagttagttagtagggaagagcgtttcagggaagagaagggcaaatctcacagcccagaggggaaatgagcagagccctgtcagagaccatagctatgcaggtgcctggggtccttcccatgctccctcaaactcttgctcaaatgttactctgcggagagggctccagacacaccatacttaaaattgacatctacgtcccccgctacatgcccttcgctcagtgcttgccttgtttttactatagcattcatcaccttctgtcatatgaagacatcctcccactggaatataagttccagaaggcagagatagatttttgtctgttgtgttcaccagtataactactgcctgctacttacaccttgaagaaatgaataaacaggatgkagcaagaatggaatgtggtgatgtgggcagaattctggggtcgaaggaactccagctggaaggtagaaaacccgagccctaaagccagcctggctgtgtataaacttggggtggggggagtaggagagaggagtggagttccttgggcctcagtttcttcactggtgagatgcatattagccaagatgacagccagcgcccctcccggcctcaagattctgagtgccracatggtcagagggtgcgggagcaactggagaatcactgtggattcctgaaccacrrggtcaaggaggtattggtaagaaaaaaatrttttttgccagtgtattccagataatttttttttagagggaggctaagaggctagaggtaaataaattttttaatcgccatctgataaaccctcctgtcaccttcttccttgcctctgtcttaccttgcccagctcctgcaagcttgagccacaagcagttttttggctctgtagatgaaggagccattgaagactggcttttggggttcatttcaagcatactagaacttcaaaagaaaaccatggggtgaccaatttatttggtttcaagcttaaactgatcaaggctcctgcatatcccatagtttgctttgaaattataaaggtaccttctttccctggcccatctcactccaaaaactccctcagcattgggagatattcccctgaggggctaacatgccttaccagccaaaccttcaagccactcttgacctctcctagagagaatgagcatttatttagggcagaatttacttgctgcttaagtatgtcaccacagtctaataaaggagaaattatagccggcagaagcatcaggcctgtaagttagttaacccaccggagactacattttattgcttatttctgagaaaggcttatctatcaacatgtgaaaggatgtttccgcacccctttattttgacagaatacttctactggtatgtctaactggtccgttttctagattatctcgttgggcatcctttatcttgctttgttttgtttttcacttctggagatgaataagcttggagaagcaacacacaaaagatttgggttcaactcccagctcagctactcactggcttgggtactcaccctctttgacctccccactttcctaaaatctgtaaaattagggtcagaattcctactctgcagggttgttaaagacattataagtaaccaggagagggttcctggcccatatcaggtcctcagtaatagccttcatcctcagcaattcctcttcacattcacagcaatagcaaactctcacccactcaagaaatgtctcatggccttcctcaattacctgtcagagtcagtgtctggctcaattctacagcagattgatgacccaagctagagctgcattttcatgagtccttttaatgaaaagattcagcacttaatcccagaaggacattgtatggtagtgccagataatgaagtagtcaggctgctgaaatgttgacagttcactctgtgcccatagaataaaatgtataggaatagagccaagaggaaggggccagctaggagagacaactgtaagagatgtgatggttgagctccccagtgagcaaggattcctctccttggaattgaaagcatttgtggacagttcatctaataaaggatttyttataaaaaccacaaagagaaaataatgrygttcttttgagacactatatattctggcagacactgcatactctgagtgggaccgttacatctggcttttgcctacgacaattcttttttagtaggcagggtataaattataaattttaaataaataatgcataatcttaaaaaaaacaataaaaccaaaccagaactgactgccttttctttttatacacatgaaaaaatttcaatgaaaacaaactatacccttggtaaatgcacagaatttgaatgtaagttcagcatgaacgtcgaagagttcatgctgtcataaaactctcttctaagtaacttttccggtttgaacacatctttatgaatacagagctgctgtgaggcttcacttattttgcacagaaagtgatttcatttccaattcttgtcctgcttccgttttcatggctatccacatcgttaggaaacttggcatagtaaggtgtccagggctgggatttgtatttggggaactaaattactcactaataaaaaaaattttttttactaattccatatttcatcatttagtaaatagccttcatcataaggaaaagctagttatttcggtggataaagtgttttatgtatttaacttttgttccagtgatattgcgtaacattcaagcaactaaccgggttgttaactcttattgttttgttgcttttggggccattttaattataggaatttatttgaatcatccgttttactgttagagccaaatcattcttatgggtttatgggaatctataccaccaggcagtagattaataactgtaaaaaaaccacatgaaaagttcactgcgaatctcagatcaaaacttgtggttttctggattttgcaattgaccctttttaaagcttctctttggtaacatgatctttatggcaacaccactgagctatagacacttgtgatcatgaaaatagcccagaagtgtcccacactcacccacagtgccrgcctccacctaccaaggaaggggatggatctgcaatgtatccattttaacacacaagcccaccttcagtgatatacatggcaaaaaaatatgagaktgaaggagactctttttttttctgcaaaaagatcggaaaaacagactggattgagactggaccacagcacttgggagggctctttatggagaaccacagcagaaaggaattctctttgctggtgaattcttctggccctttgcactgtcattcctggagcgtttcaattattcccccaaccagcaaacggctcactgatcagcagcccccattccccccctgccagcttcttacttgaaatgtgttgttggaaccagggcagcccaggggactttgagtttgggcactggggaccaaattgtcagcctattctgaacttccatggaatactcaaggagttaaccagagcgattttggcttcactgggcccccacacttttttktataacaaagactyggacactggaaaatacattcaaaacatgagccaagagtggagttcagcgggagatagttcaagagggaaaagcagcggaaaggcatgcacccttcaggtccttgctgcctgtaggcctctgaatttcaaatgtgctattggcgccaggttctttggcacgctggatctcttaatggtgaggggcagcactgcttcacttcctgaactgaaatctctcctctgcagcactctgtrtatcagtccccagcccttccttccctgcccacccccaccccgccatgggaacaaagtccccaggctctggaaagtaatgctaagaaaacaaacactacaaaggctggtaacagggggatatctctcttgaatgttattttgtaaccatctaggttcaaggaggagggggtgccccagctacaggagccagcagggtccctttgtagtaggcatccgtgtgtttggccagatgtcctcccagcggagggcagagaggaagataaaacagaattcttattaaaaagaagtcaggggagggggaaaacaagacagagaaagcgtgtcaagtggaaagggaggccaggcagtgccatctgatattgattaaatgctgatagagtcagcagtgagaaatgcacacggtgaggaagtgccccagctcttyggaatgtgaaccagtgacagctgtcygggcttggatctgcacgaataccacatgcaccagatgcctggcggccacagggctarctcacggggaaggatgggagggaaagatgagtgtgctggagtcaggacctgtggcttctgatcctgcttcccctctctgggcctctcttttcccatcaatgacacaatgacgcttgacctctgcacaaccttctagctcccagattgtgtcatctactataatctctgctctaaccaaatcttctgaggctctcttagtggaatgtaagaaatcatcctgaagaggcataagaagctcacccagcatggtccaaaaatccaaaaggaataaacccgcccatcagccatgggagtgccacccagtccttcagcgggaggtcaggccagcaccccgtgtctgtcgcccttctgtgcttcacagttgccaccaaagcaagttcatggtttctcagcatggaatgtrgcrtgtctgtgggtctacctatatgttcctttctctaaatttcaaaaatattttcacccttattggatgtaaagagtcttttttcattttataccatcagattacagagagcttatgcgctggtccgtgtgtgtggtgggctggggagagtgtgggtgtgtgtgttcatgcgcgcatcctttagttaagagtgccttcttgaaagcttgttgttttgtttttttcctttttagcaaatgtcatgaggacagtggtattttaataaagggtgaggctagattccagtgggaatggaagaggaagcttccactgagatgaaaagatctcacactagggtggtggcaggggaaatggagaggaaacgatgactagagagagggaccatggcctagtggagagatcgtggcatctagagtctgacacaggttggagtcctgactgcaacattgtatagagtgtcagttcagctctcaccaagatgcccccttgcagtccttttatggattagaratgctgtgtgtaagggatctagctcagaacctggcacactgtaggcagtaagtgaacatcaataagctgtagatgatgatgatcatgatgaaaaatagcccacaaggcctgtgactgaattggagaataagtacaagagaagaaatgatggtgtctttgagtttaaccacctgagggattgggatagaaatagtagttgagttgagtacaataagaaaagttgggtggaagytggagatctggtttggcagggctagaactgaagtcagttttagacataagagacggtgctgagacatacaggtggctataaggaagtaagacagaaaggaaggggaggggaaaaatggaaaaattataataaacaagtttatttactctaggtctgtttgatcagtgagtctaattttacaagcttcaccttcaagggattggttaaccaaaggtcaatccatcatgaccagcttctaaactaaatccttgctcctcgaagtgtggtcctcagaccagttgccacctaggccttgcagaaatgtagaatcttagctcctccctcagacccactgaatcggaacctgcatttcaacaatgtgatgtgtaagcactttaaagtttgagaagcattgttcctgagtgtggtccacagaccgcagcatcagcatcagcatcagcatcagcatcacctgggaacttcttagaaatccaaattcttggccaggcgtggtggctcacacctatactcccagcactttgggaggctgaggcggcgaggtgggtggatcacttgaggtcaggagtttgtgaccagcctggccaacatggtgaaaccccgtttctactaaaaatacaaaaagtagccgtgtgtggtcgtgggcacctgtaatcccagctactcgggaggctgaggcaggagaatcacttgaacccgggaggcagaggttgcagtgagccgagatcgtgccactgcactccagcctgggcaacagagcaaaactccatctcaaaaaagaaaaaaaaaaaaaaagaaatccaaattctcagktcccttctcagacctcctgaattagaaacagtgtgttttaatgactgcttcaagtgactctcatgcaccccaaagtttgagaagcactgctctaagtcatgaaattgacagatgcacctcctccctttgtgtctacagccagagggatgtgctgaacaccagagggattggttgagccctgaaagctaaatttaagtcattgttatatgctgtttctctcatcattttgcattaaacacagctgaagaactcttttcactgaagaagggcactatgygtaaaattacaaaccaaaggagagaaacttcaactgtggcttaatcctcatgacttacccatcaaaagttattgagcacagttatagatcagtcctttatgtgctgttgctcctgggggacgctattagtaagacacacatagggaaacaggtcaggaaaacagggaatctcctgatattccttacaatgtgattttcacattaaaacatccacagtctttgtcttgtgtgtgtttctaatctatcagatggaaattctctttttaaaggtttctggagtcacttgcagcattgatgctggttgaccactcagacaagaatgtttttcaaaaacgaccttttagcagtaaaaatttacctcctctcatcaaaagtgtctggtttttctatttgttctacagtcattattcaaatcgctgtgataactaatataagggtcactgtctgtttcttgtatacatgtaatatgcaaaatttgttatatattgggcagttaattataagattacttgtattttctgccataggttataatacattacaaccagtggcatgccggtaaactagttgtttgcggccagggaatgggggccatcctaattygcggtgtttgccaatttctatggtgtaaatactccctgcagggctgatttcaagctaccaacagtttcacaaccagctctcaaarttcttacaaatttaacagttggctcttacaagccagtaggaaccaacttcagcaygccactgaaacaaacatcaagggaccaatcaataggatttttttgttgtatttgaattgctrtaggcctaacagtgtctgaaataagtaaatttgaatgtttaaatattttgtcatacagagatttttattgaaattatcatcgtaattatcataatggaatttgatttgaaactacagtcatgtgccacgtaacgtttcagtcaacaatggactgcatagatgatggcagtcccataagattataaaactgtatttttattgtaccttttctatgtttagatacacaaatacttaccattgtgttaaagttgccagaaataaagttgcctgtcagtacagtaacatgctgtacaggtttgagcctaggagcaacaggccataccatgtagcctaggtgtgtagtagtctataccagaggtccccaacccccagggccatggaccagttacctgttaggaactggactgcatagcaggaggtgagcagtgggcgagtgagtgaagcatcatctgtatttacatccatttcccatcacttgcatgaccacctgagctccgccwcctgtcagatcagtggcagcattagattctcaaagaagcgcgaatcctgttgtgaactgtgcatgtgagggatctaggttgtgcgctccttataagaatctaatgcctgtgatctgtcactgtctcccatcgcacccatacgggaccatctatttccaggaaaacaagctcagggctcccactgtttctacattatggtgagttgtataattatttcattatatattacaatgtaataataatagagataaagtacacaataaatggaatgcatttgaatcatcccgaaaccatccctacccctactctggtccatggaaaaattggggaagaagatggggaccgctggtctrtaccatctaggactgtgtaagtacactctaggacagtgrtcccctacctttttggaaccagggaccagtttcatggaagataatttttccatggatggacagggggcgggagatggtttcaggatgaaactgctccacctgagatcatcaggcattagtcagattctcrtaaggagcatgcaacctagatccctcgcatgtgcagttcacaatagggttcacgctcctaagagaatctaatgctgccactgatctgacaggagacagagctcaggtggtcatgctggctcacctgccactcaactcctgctgtgcagccggttcctaacaggccaccagactggtaccagtccatggcccgggaattagggatccctgctccaggatgttcacacagtgatgaaattgcctaatgatgccattctcagaatgtatccccattaactgatgcatgactgtattctatgaaacaaagttatgtgctatttttaagtcatattaaatacagctataacaatagaatggtaatattgaagtgcttatgttgctcaagcagtgtgtttactgtcaaaatagttctcatagtatagtaaggcatttgtaaaaattattcttagtcccaatatttgaacctaaatgcaaaaagataaattttraaatgacatctttgcttactgttattaaaatttgacttctcttacaggtattcaggaaggaacacaatgtaccaaatgtaaaaataactgggcactgaagttttctatcatattattatacattttstgtgccttgctaacaatcacagtagccattttgggatataaaggtaagcatgctttcttttttttcttccaaataacaagtgttccttcattaatttaagcatgagaaaactcatatttgcaaatacraagtatttcattcatacaactcagatgcaaaataacaacatgataaacttcatctctgtatcttaaayttacagctatgagatctgaaaggggggacatagtaattccttttgactcatttcagcaataatcagcgtcctctctgagagttataaagttttttttcccttgttgcttttttctacctatttctagctactccttcttcctctatttttttttctttcgtcctatctcttggaggctttatggaaaccctggagtcagcacacaggaaaactatattgacagagaataagcaaaacacaagatctccagagatacaacatacttcacccagggatcggccaactaattcccttttttctctgcagcacattcactgtggtcactgttgtttatatagctctataaaaatactgccctgtagaaattaagcacagaggcagcactaccacctcaccctactttataggatgttgggcctaaacatatctggtttagggtaagggcaggatttttgcctgaatcctccagacttgcagacacagtaagttccccatgcacctttcagagaccataggtagaaggtgtcgtgattcagaatcacaaaactacataagcccttttctagaaaacagccagggaaaccttctttaaaagacacgtgaggcaaacacggccatttggtttcagaacagaggcagacgtggagtctgtggatcatcaggtcttccctctgctgtgtggcccacagactgacccaggaaaagaaagactccaagtgaattccctccaactggtcattcctcccacctctctcccagcatgtagcagtttcctgagaaagcacagtgtgtattggaatgagatgggtgtcagggccagacagtccaagttcaagccttgatcctaccatttttaatacaattgtgaatgtycagtaagtgcttgctactgtgccaggggtcatgctawgtcttctgcatggctccatacccaggtgtgaatcatagcctcttagagcttctgatttcttatctgcaaaatggcagtaataatgctacttgtcaaggtgtttgggatgagcaaagatgatgtaattgaagaatctctcctatagctggtcccaggaaatcatatctgtatctctctgttccttgcttcttcctagccacattacacagcactagcagttagaatggcaaaacctgtcaaamatcctcagtacagtcgggacttttagtcccatctctaaggccatatacgtggaaaataatgtgcatcattgagtgtgttggctgattagtttggacaatggaaatctggaaaactaccaggtcgttctatccatttgtgatgagttagacygtgatctaacccagagcatcttaagtttttagatgaagcagcaaacagagtaagtgattaaggaaggctattaaatcatgattagcgctgggcagaggtggggtgggaagctgatgagagaaaggagggttttccatgtcccaggtaatccggactatctctcttccttttgtttagattatttaggtcattactcacttctccatgacttttcctagtgagccaagataaaggagaagcttgaaatcagccatttaataagtacttttaagcctcagtactgtgtaatcacatttactgctaaaagagagatgagagtggtttggcaaatatataacatgttgtaatttttacctgtgctaggaaataaagtctrggacatttatgcattcagaattatacaaaaagagtcaaagaagaggctttttttctcctttcttttttttctgtttgtttgttaaggtacagatatttcctccctttttatccatggaaagcccttcctggctctggcgtgttgtgcgtgtgctggtycatttgcccacagcaccttttctctgctctccagctaaagtgcctccctcccacccttcatgtctcatgtagacacatggcagctcccgaaagctgaattaggccccttcctgtttgttcccatagcacccagcatttactcttagcccctgtcacactgtgtcattagagtcagtggacttgtctgtgtcaccacccaaactacgagtttccatgaagacaagagactaccttttatttattatatctcccaccagcacctagtctcatgatatttaaccattgcccaggaaagttcactgaatgaattaatgggaggatggatggatggatggatggatggatggatggatggatggatgcatggatggattgatggattgtgcattagggctgccttccaggaaggcaaacagcagatgctcagggacctctaagccaatctgcatctaggggatagctgcccctaaaagccctgcctggaaacctaatgttttggagattggcttggcctgctctgtgggggcagtctcaccaagatgaaggaagaagagataatggggagcaagtacaaggggaaacgagatgatgtcttgcccctcttttctttccttcagtgcccccctccttcaggcctccactgaccaaaaaaaagataatacaacatgcacttttgctttccaaacacaccattaatgaactaaaatgttgatattttccagatgtgctttctctttactcacacagtgactcctctttcttgctggtaagattctagtgacccaatgttgtaagaggcagaaagataaaacccagttctcccttcacacattccccctttgaagtctagagaaactctctccgttamaaaagaaagaaagaaaagaatattcaatgaaagaaacacaataaggcattcctctgaaggagaaatcgaaaggaaaggagtaaaaacttttatttatcagagytggcaaaggcaacttcatactgttttgctcaaaattgttcttttcttctttcatgtcacttacatagccacaagttagaatacaatgagcttccatcaagagaatttgctgaagaagccagagaatcgctcagtcacccagacagggtctgtgcagtggtcgtgactgtgaggcrtatcagccactttgcagaaaacatgttcttggacagttgagcttggtacatcctctgccccgggctttttatcattagtcaacagagcttccatagcasgagtcatctcttaagttcaatgtgtcatgtttcttccagaatatttcctgaacaggaaaatcctactccattatcctttccaacaggcaaccttctaaaggtaattaggaaaaagaaaaaagacagaaatctgaatctttctcaataaggatctcctttaattcaacattcctagtcactggtagtctactttgctgctaagctgggtcagtgtagcagtttacaactggattactatttaggctttcaaaatacacatcaaatcacactggagagcgctttaggatccaggataacaccctacaatcagattttctgtatttctgtaaggaaacctaaaatggtgttcaaggtagaaatgcctttattaaattccagaggagtgtaactaatgttactgggaagccccaggtcccagagagaggaagtatttatcccacagtgccatgatcagtctggtacaaaaacgtgtgagcaccagctaggagctctgtgctctgtcctcagggccgagaccatggcctgtgtctcttgaatcctcaatgtctagcactatgccacctacatggcagatacttggtaaatgtctggtgatgttaactttaaagagaatataaacagaaataattcttccccttaagggattctttattggaggaaaccagatttaggaaaaagaaataccaaaagagaggtgatacggagtcatagaaagagcatggattttggagttaaaccttccagcctggtatcccacatagtcactgacaagctgtgtgactttttagcaagttactgaacatctgtgagcctcaatctcttcatctacaaaacagcagttggaaggattaactgcagtgatggtgtagtgcatccrgcaaagagcaggcactcgataaatagaggctattattattatcattcaaataaagatcgagttggtgtgcagtggaatcaacttgtaggtgtggctgagtacaatggggtagtgaggtgtggagcggaccttcaaggagaagtggagtcaagacgagggaagaagaagttagtggcccaggccaagggatgataccgaagtgcttttataaaaaaggttttattgtcagagtatcctagagaattatactttggatacttgaagagggacagatcttcaggtataatacctgaaacaccaatattctgtagaaaaattctaccttaagaaacaattcccaatacaggagagcctatgagaaaccagactgctggtcacccttctgtgtatcctgctcatttttctcatgtgagaatggtctgcaaactgaggtctatgtctatagactgggaatttccagggtaatacaggatggctctgcgactgtattcctgattgagaattggtgctaataaattcagaataaaagtcaatgaaagtgctgtgtgctgttacagcaagggtaagttctggatctccaccagtctggtatttttatgcagtagcaggttccagcattgcaatcctaacatttccagctttataccagatcctattgttaaacaaagacacacaccccccagtgcatgtaaactgttcattagcacttgygggcagggaaaatagtttccttttgctgcacagaagaaaacgtcgacagattttttttgttcttttttttaatgaatgtatttatcccttttgtatttattctacacaaacctgagttatctgtccatgacagttctctgtttttcaaaactaaaatggaagaaaaagtagaaagggtagaaaatgactgactgtcagcatatttgaaggtttctttggcttccaggaaagaagggcaggacttgagatcctgcatgtggtttgaggacagaccgaggcatatgttttgatttgaggatcaaaactgaacctaaacctgtaaacattctgtattttagttcttaaaaattagctttgctaaaaacacatatgcaacattttattcttgagagtttccagggatttaggagtatgtgtacctatgaagcaaccctaaggtacagattattagaactgcatctctctgtctatgtagtaattttaaaaatartaattactcagcraaatgtcatactcactgccaatgctcaggcttccctgggttggttgggaaacacgtgtttgcttgccctgtagctcagccggcagattgctacttatttaaataaatccctcattcctgtaatcctagcactttgggaggccaaggtgggcagatcatctgaggtcaggagttcgagaccagcctggccaacatagagaaaccccatctctactaaaaatacaaaaattgacgagttaatgggtgcagcacacgaacatggcacatgtatacrtatgtaacaaacctgcacgttgtgcacatgtaccctaaaacttaaagtataataaaaatacaaaaattagccgggcgtggtarcaggctcctgtaatcccagctactcgggaggctgaagcaggagaatcacttgaacctgggaggcggaggttgcagtcagctaagatcattccattgtactccaacctgggcaacaagagtgaaactccgtctaataaaaawttaaataaataaatgacataataaatatatattcattgactacctacaaagtgccacacactgagctaagaggaagagatggaattgaatgtaaattttcctgccctaaaggatatwatagtagataagtcatgacagcacagtgcagtgagtcccataatagagaaaggactacttgccaggggaattctgcaaggtgcacctcggcaaagggttcccacaggaagtgacaagcagagtcttgaagagcaaataggacttagctcagtaaaaaaaaaaaacagggaagaacwttctaggtagagagaacacatggaaaggctcgtgtgagagagtgtttgtcgcagtgcacacatttcattatgaccagacggtagaagcttgagggaaaacagtgagcttctccagggacaattccaggatccaaggagccagttcacttkgggtcacacaaacacatggkaacttactacttcttcctgagaggagccaggagaatctcacacagtcatgcgtgggtagaacatgtgatgaatacaataaattagatccgtkggctcataattgatatataaagcatgttctcattttttgaagtcttttttttttttttttttgagacagagtctcgctctgttgcccaggytggagtgcaatggcgtgatctyggctcactgcaacctccacttcccaggttcaagcaattctcctggttccacctcccaggttcaagcaattctcctgcctcagcctcctaagtagctgaggttacaggcgtgtaccaccacaaccggctaatttttgtatttttagtagagatggggtttcaccatgttggccaggctggtcttgawctcctgagctcaaatgatccacccaccccagcctcccaaagtgttggaattacgggcgtgagccaccatgcccggtctgaagtctttttttttaagctattgatactaagaaggacagtcagacttgatcccaagctgctagaagctgtatctcacataaatcacttttggagaaacatcctcttatttaacattttagaaacgtgtacttgaattcataactgtagagaattactgccttctgaaaatgaataagaactgaagcttttatttagtgtggctgtattagtccgtttccacgctgctgataaagacatacccgagactgggaagaacaagaggtttaactggaattacagttccacatggctggggaggcctcagaatcatggtgggaggcaaaaggcacttcttacacggcagcagcaagagaaagtgagaaagatgaaaaagtggaaacccatcagatctcgtgagacttattcactaccatgagaacagtatgggggaaaccgcccccatgattcaaattatctcccactgggtccttcccacaacacatgtaaattctgggagatataattcaagatgagatttgggcgagaatacagccaaactgtatcattccacccctggcccctgccaaatctcatgtcctcacgtttcaaaacaaatcatgccttcccaacagtcccacaaagttttaactcatttcagcattaaccctaaagtcygcagtccaaagtcccatctgagacaaggcaagtcccttccgcctatgagcctgtaaaatcaaaagcaagctagttacttcctagatacaatgagggttacaggtattgggtaaatatagcctttccaaatgggagaaattggccaraacagaggggttacaggccycatgcaagttcaaagtcagcagggcagtcaaattttaaagctccacaattatctcctttgactccaggtcgcacatcccggtcatgctgacgcaagaggtgggttcccatggtcttgggcagctccacccctgtggctttgcagggtacagcctctctccctgctgctttcatggctggtgttgagcatctgtggcttttccaggtgaacggtgcaaactgtcagtggatctacccttctggggtctggaggacggtggccctcttctcacagctccactaggcagtgccccagtagggactctgtgtgggggctccgacaccacatttcccttccacactgccctagcagaggttcttcatgcacatcccacccgtgcagcaaacctctccctggrtatccaagagttcccatacatcctctgaaatccaggcggaggttcccaaacctcaattattgatttctgtgcactcacaggctcaacaacacatgaaagctgccaaggcttgagacttgcaccctctgaagcyacggccccagctccacattggcccctttcagccatggctggagtggctgggaagcagggcaccaagtccctaggctgcacacagcatggggaccctgggcctggcccacgaaaccattttctcctgggcctccaggccagtgatggaaagggctgccaggaaggctctgacatgccctgaagacattttccccattgtcttgggggttaacatttgggacggcaagagaaaattagaaagatgcaaaagtggaaacccctgataagaccatcagatcttgtgagacttattcactaccaccagaacagtataggggaaaccacccccattattcaaattatctcccaccaagtccctcccacaacacatgggaattaggggagtataattcaaggtgagatttgggtggggacacagccaaaccctatcagtggcattactttccctatcatatgcaatcaagaaaatactaccaaaaaatacttcttggcaaatcattgtttggaaacaccactcaggcatctacttragaactgacaaactacagaatcagttgtcactaacaaaaagcagattttcagggccttgtggtggaactyataacagaaagtggcagacactcttgactttgcaacctttctatgccgattttgtrtatagaattgagctgggttttccttgccaatggaatcctyttctaggtaaatgagtcccacctgccaagaatgttagggaagctgatgagtgacaacattttgtaaattatcacagtgtgccttgccttcatctatggaaattaatataggaaatagcagattagggacttctaaaatgcatgaaaatttttaaattagttccaaatgatttctgaaacatccaaggcattacagaatcataagaatagttaagaacatacaattctcaactaagtaaattgtacccctgggttttgtgacaagtaagttatttttccaaaaagatggcttttctttcctatatttgatttcagttacactgttttcgttcartctgtttcctttgttccataatgaaatgatctcttgttttgaaactgaaaaataaaatatgagcagatatgtatactaatgcatcattttccaaatcttagttgtagagaaaatggacaatgtcacaggtggcatggaaacatctcgccaaacctatgatgacaagctcacagcagtggaaagtgacctgaaaaaattaggtaatctgtgacaagactaaaccatgaaatcccctgactctacataaatgaccacagcttcttagaatgatgttgctataaactccccattcacccggaaggacattcaatttttgtgttgcatgttgagtctcccctcatgatttaattcaaatgcttaaattttaaagttaagggtcagttttggaattaagtcctgccaagaaaactattatgtgccaaataatatctgaagatcaatcctgactgaaaaaaamcacaaataccctttattaaaaactgtcacataaataggaatttactgagcatttttgaaatactttaaactacatagaattgtagaaattaagttataaagtgaaagatcctagcatattctattccttgatttttgctttcattaaaaaaaaatttgggaaatttaaaaggttagtttcttcttgacagcctgcccactgccctaaaatctagtaaattccccctccctctttgagaaaaatgttcagccaagtttgtcattcctagttctgagcttcttttccgattccccaggacccagttttaatagatatgtacattttactaatgcagagctgtccgcttatactgccaattttgcatctaaaatacagtgcataccgattaagtgtgttcgggatctttggccttgcctgaacacttctccataccaccaatataagtcacagatatttcttattccaggtgaccaaactgggaagaaagctatcagcaccaactcagaactctccaccttcagatcagacattctagatctccgtcagcaacttcgtgagattacagaaaaaaccagcaagaacaaggatacgctggagaagttacaggcgagyggggatgctctggtggacaggcagagtcaattgaaagaaactttggagaataactctttcctcatcaccactgtaaacaaaaccctccaggcgtataatggctatgtcacgaatctgcagcaagataccagcgtgctccagggcaatctgcagaaccaaatgtattctcataatgtggtcatcatgaacctcaacaacctgaacctgacccaggtgcagcagaggaacctcatcacgaatctgcagcggtctgtggatgacacaagccaggctatccagcgaatcaagaacgactttcaaaatctgcagcaggtttttcttcaagccaagaaggacacggattggctgaaggagaaagtgcagagcttgcagacrctggctgccaacaactctgcgttggccaaagccaacaacgacaccctggaggatatgaacagccagctcaactcattcacaggtcagatggagaacatcaccactatctctcaagccaacgagcagaacctgaaagacctgcaggacttacacaaagatgcagagaatagaacagccatcaagttcaaccaactggaggaacgcttccagctctttgagacggatattgtgaacatcattagcaatatcagttacacagcccaccacctgcggacgctgaccagcaatctaaatgaagtcaggaccacttgcacagatacccttaccaaacacacagatgatctgacctccttgaataataccctggccaacatccgtttggattctgtttctctcaggatgcaacaagatttgatgaggtcgaggttagacactgaagtagccaacttatcagtgattatggaagaaatgaagctagtagactccaagcatggtcagctcatcaagaattttacaatactacaaggtaagtcaaaattctgaatttgtatttgtattagttgtttattgctgcataacaagttactctaaaacttggcaatttaaaacaataaatattcatcatctcatagtttttgtggaccaggaattcaagagcagcttagctagatggtcctgactcactgtttttcatgaggttgtgtcaagatctcagccagagctgcagtcatctgaaggcttgactgtggctggagggtctgctacttaagtggcctgttcacatagctcttggcaggaggcctcagttccttgctgtgtgaaattgcttgagtgtcctcacaatgtggcagctggctgctgccagaacaaggaattcaagagagagaacaagaaggaagataccatgacatactagcctcagaagccacacaccatcacatccacttcattctgtttcttagaaataagtcactaagtccagcccacactcaatgcaagtggaattaagttccacatcttgaaaagaagtgtaactaagaatctgtggacagtacttaaagggactccattaattatttgttgagtgaaaggttggttaatttgaattttcttggtccttgagctatttcaatgcaatataaatcaagctcctctgaaagcaagatcaagtcttttgggtcacaaagctaccattaagggagttacatgtcatgagtagatgaatggttggccatcacagtaacacagaggtcacagtaaggtcacagaggaaggaaacgatgtgtcttgcttataaaatctgagttttggtaggtgtgctggctcatgcctgtaatcttaacactttcggaggctgaggtgggaggatcgcttgagaccaggagtttgagaccagcctgggcaacatagcaatatcccatctcctaaataaacaaataaatgaatgaatacatacgtataatctgaattttactgttatccagatcatccatataaattaaaagtccttgactcagactaagtccacagttgaagaattgtagcatcatatattaacagtattttccagtcacaaactattttcacaggttttaagttgaaagtactggtggaagatgctgtgctcagcagtctggggtatacaaatgaaaccaacggtcctcacccttagggagtttaacataaagagaatttcagggcatcagaagatgggctgtaagcaaacattcaaggggaagggattacacaagggcctgagtcactaggggccaccttggggtatgtcccccacactggtctaataatcaagggtaaagagtggtagttaataagcccctgtgaggctgaaggcagatccggatagcagatggcaggactctgttcaatagctttgtcagtgactagcatggatgacctgctaaagcaatgcttgtgtgacttgaaactgtatatgccagccagtggctgatagactcataatccacaatgatctagagaggccaggatagtatcaagatgtcaatcaaatgaagtagataggaatacatgtaaaatcctgctcataaatggatgagacaaaacagataaatgttgatgggaaggcatggctggaaggaagtgtgcatgaagcatggggattttagttgactggaagcagtgaaatatgtcttccagggaagggaatgtgttccttgactgtggactgtgttaagaaaaagggaagtaacatctgactctgttcagtatgccaagaccacctctggaagataatgtttactttgagkagcccctttcaaaagagacattcccagaccagcatgctcagaaaagcaacatcagaatgataggggctagaaaccacgtactgtgaggaagggttgaggacctgggagctttcacccctaggagagcctgttcagtggagaacaagacagccatctgcacttatttaaagttgctctgtctgaggaatgccactgggtgaaacaagactagtgggtgttcactaagggaagatcaattttggttttacagaatgttcctcataaaatgggtattagctgaaaatataatggctcccctactcaatcaggatgccccagctctggaggggctggacagttgcaggtcagggatatggtaggtgtgagtcttactctgaaaaaggggtagcccttcaaatgatttaaaaaaaaattcttagacaatcttatcatggtattctggatattttctagttattaattttatagttttattatttcattaatttaattgttaccttgtcttcagttatttagtttatagacagcgtggcttatcagccaagtaaggacatgaaaagctagtatttgaaggtgagaccctgagtgtttaagttaatgtttctattgttaggattcttttatcagctagtattgaaagtgaatgtactgagcacttttcaccaacgtcccaatgaatcctgacagcagctctatgaagcagctacttacaatgtcatcgccagtttatagacgaggaaattaaggcttagaaggtttgagtaacttgctgaggtttacacaagtaaaaagtagctcagtggaatccgagcccaggcygtctggtgccaaacctgatgccattaactccaaggatagtcaccgaaagtgtgtgcccctccctacggtacccggtcaccccagagagagcctagaaggtcagggagttgggattttattctaagcgtgagggggaggttttaagcaaggtgttgagatgatctgctttatattttcacaaggtcactctgggggctgcgaggagaatagagagcagggaggggtcaccgagagcacggaccagctgttggtgacttggcctagaatgctggcagtggagaagggagaagtgggtaccctcattcaggaggagagttggagatagaatcaagggcatccctttccttgccctgacaacagggaccccagcttwaggaggtcccggccggcctcccccacctgagccttgctgaggtgaggagtcctcggcctcaaggtgctgtgagtattcagagcccacaccaacccctgcttgtccwtgtttgtgcccaggaccctggaattccctacccaatgtgcccagaagcaaaggggcagccaagaggcacttgtgtgttgtagggattgggggtgatgtagacagaaattgaacacatggtagggggttggtgtgagtgtctggacgagactggcaggcaggacctgctgatggattggctgtggggagtgagtgaaagagaggaacaggatgtttcctaagtctctagcatgagcagtgaggtggwtggtgatacagactggggagytgcagaaaaagaggcccatgtagacacgttaacaggatgatgtctattataatagaatgaggtttccgactcatggaaaagcatatgtgataaagaaaatctcaattctgaaatcaggctccaaggtgtttcagagacactatcacatttatcactggtcttgttgttcactgcactttctgtgagttgatctgagaagcttcccaagccaaccaagctgctccctttctattcattctattccactgcctccagaccagcaatgcccagcaggtattctaagggaacgagagactgaggggaagaaggaactccatttctgaatgcaagtgttttcttccacaccttttctctctagcacctttccctttctgtacatgcagatctcatcccagaggatgaagggcagatggataaagcaggatgrattaacrttggcttatgtggggctggcatctgcaagattcaaaataatctgatgctttccggaaaattcctgttgactcgcacttgatgaaccccagtgctcactgtccagttcagccayatagacatttgccgcattaggaattgggagctgaagctgactgactgtgccgaaggcagatgatagtgtagagatagatgttcacagtatctctacatccatcaaccaagaagccttgttaagaaaaccttattttttgggagtttgcaaccagcctgaccaacatggagaaaccccatctctacttaaaaatataaaattaaccgggcgtggtggcacatgcccgtaatcccagctacttgggaggctgaggcaggggratcacttgaacctgggagttggaggttgtggtgagctgagatctcaccattgcactctagcctgggcaacaagagtgaaactccgtctcaagaaaaaaaagaaaaaagaaaaccttattttttgataaaaatcatataaagatttttattctaattatgtacacagaagacttctcacacatgcttctaggtacaaagatcactccacctcctgggctgttcctctgcaagctaaggaaagcatcagttgcatccttcctgtacaatcagacatcttccctctctgctcttccgagagtcatcagatttaatgagtgagaacaagagctctggaatcagacagagctggattcatgtaccaagttcctcatcctctcagtgcctctgtttcctcatctgtgtgtaccttttagagttatgaggatccaaagatgtaatataaagaaagtacttaatgcagtgtctagagtggggtcagcataacacccaaatgtaaataaggtcacttccttcaaagctttcccttctgctgcagctgtagccagtacattacagtggaaaacaaaacagcttcatatgcacaaagaataaaatcacacaggtggggttaaggatgatttgagtctaaaagtgcttactgctggatttctagtgcccagccttagagatgaatcagaccccaggatgctgacatctakctagctttcactcattttctcagtccacatttctggggtgtctatgctatgccaatcacgctgctaagcacttggataaattatcagctttcattgttacaactctttaagggaggagttattgacattccccatttgcgggggagggaactgagacgcagagagcctgagtaacttacccaaggccaaacaactagtaaatggcagacagtgccaaactcaggtctgtctagttgcaaattcatgcttccaccatgaatagatgacatgtttggggaggtggaaatgacagagagtttactgacagcagagcaattggttaaagtttcaatagggattgacatttcagctgaaacttgaaaggtgcacatgaaggttgaygggacaggggacagtgcaatgtgggtcaggcaggggcctcagttcctcccattgccaaccactccctcatgctacacttccccaaacaagacrgcatgactggagatcctggagagcatccattaacaggctcagaagcagaccatggacaattggcaagaaacagtggttaaatacaccctcctctgtggacaaggtgcttccaaggctttccaaaagcccaactgtatttctttttaatctgtacattccttttcacctcagtgaagcgcaatgactttttcctatggtaggcatttaataaatatttgattaagtgcattcaaagtagatttttaaatgagaagaaaaacgtatcagattgtatcactgtttttcctctaccttgtctatcttccaatcttaccaccagtgggtcttaacattgagtctctaagattttggatggcagtaagaattaaagtggtttctcttccttttgttaagcaccgggagttttgttggaaaacacatttgaaacttctcttgggtaggaaactgggctgggcacttctcaggcctacagtttggtttgccaragcacaaacagcacagtgatttaaagtcttccatcctctttgaactgcttatttagaaaattcaggttttcaaggctcccagaaccgtgggcctggggaccgtggggtagaggtgtcactgacagcacaaaccycgggctgcttggagctctggtattgttcatattcaggcatctctggagcttgtgacagctttaccagccgcgtgggtatcctggcatttcagaaacccgagccagtgagccacccstacttggccttgacattgagttaaaatttcagtcagtttgaaagcaaacctcaaatgtccttccacgtaggacatcacatgtgtttccacatgcggcgttgctgttttctcaactctgaattcaagttgttgctgcacaagctcataaacactctgttctttttgtttttttttttttttttgctttcaggcactaagggtagcttctattttatttcattatttcattttattttcaccttgacagctgcccaataaaagattcaagtgcaacctcaaagcctgagatcatccagatgctaatcagcagtgccagcatcccgggtcctagaggaaaaccaaccctggcattaataatctacttttttatgaggagccagtattgactttttaaatggctttagctcttcttctcaatgatttttttaaaggaaaaaaaatccaggaaatttctagcctgtcttaatgagccaaagtagattatgtgaatctcctgatctrtaagacasatagaatatgttttgacctarcccagcatctgagggcagagagtgccagctcctttgtggtttttggaaggctggggcagctgtaatggaagacaccaatcacagtgggcttgccagtttagccacagccaggaatattaagccttatctgatkaagagaaagacaggtaacctatttaggatagatgtagtacttcggatggggaaatttgctgggaagtcaatcacmagtagaactggagatctttatcaacggcaaaaacgtgcatttccccccgatatttactcccttccttcacaagatctggagattagcacctgctgaaatcttgtgctgtctgtgggatccacgtttgaggtcattcttcacgtaagccacaacttacacattgactgggtggggagattcaatagccacttccagtccagaggaaaatagctgaacaccataaactaccctaccccagaaagaaataggatgaatgaaaagctgtcaccccaggtgagggaggccttggattcatgtcaggagaggaagggagagttgtatctttggaactctgtcacaagctagaagaaggtgttctggaagaaatacagctccccccaccagcagtctgtctgagcagacacaagcctgtgatcagtccctctttcatggtcacaggtaaactcatttcccataacttgcaaggatagcaccaaccccagatgtgagtgatggagaaacacaaattatcagcaaaaaaaaaaattaagacaataaggctaaagattatttcttaaaacacttgaatttcccaatatgccatcttcattattkggatttcctaaagttcaacacagaacataagtaaaacagaaatagttgagaaaaaagtttattttaattttgcagttactccacatacactagaattttttgttttgttttggcctaaattgtcagtattttttccctagaactatccataatgctacgtccattgtggcggaacatacgtgacaccttcaccactattcatctctgggatgctatttcccaactacacagaggcactaagttacttttttaaaggagatagatctggcagcaaaaagtctaccttcccgatctttactaaatggcataggctatttaggtgagccagaccaggttaggcagaaaaaaaagtccaactgtggatgtggagacccactggattaattcatgagggtcagtagcaaggaaagatggatctccttatgattatttcgtagtggcagtcacagcccacctgatacagagattataagatgcggggcaccaggcaggtcacccttccccaaaaacctgtccctactgatctcacctggggcacaaattgtgagcgttagagtgctggactttttaaccatgatgcgcatgtatttgataaacacttgcttaatagtgactgtgagccagaccctacaaggggctagacatggagaagggtcttgagtagaacaaacaaggactaaaagattagagaagaagagaaaacttccatctgaagtggcctgggaggatgccaggaattttgcagaaggacatgggcagaggaaattgtcggagaagagatgtktggaaaatacagaggaggatggaataaacacaggcgagactaggttgggaggagccttcatgccagactgatcaggtggggctgcatattcttgagcaagtggagatcagagctgggcttaaggaagacaaaagtcagagtggaatgaatggagaggaatcacaggtaggaagatcaattaagaagttactgtgaacaccttccaaaaaagacagagagaggtgggaagaagagagcccacactagggtcatgaccagggtcagggcgaggaaaagagggttgtggcaatgtggtgggagaagggatgatggaaggagaacacgcacagcaaagagacaagaagttcagctgtagacacrcaggttagaggtgctggcggaacctgagaaaatggacccttcactagcgggtgcaaataaggacccagagcccagggttgctgaagacaaggaggagtcaacaggagctgtgggcagaggtcagtgacatgggtctaggtagaagtgagttcatccctaagtcttctaaastctcccatttatggagcagataacactagaaagaatgcatttaggccagtccttgccattagcgtaaactctctttaccactggaagagggtcctgcttataaatctgtgagcaagatatgggtagccttacgtaagcaaattaagtccagagcctaagcttctgctaagagagaacacagacggattggcttgactgggagccatggatattagggtacagaagacatccatcaagacctgggttgggaaggagacagggagatccccctacagaggtaggaaggtcctgtcctcagaccaatgggagagggaggccaaggagcaggagggataaaggaacttagggtagatctgccatccatcctccattgctccagcacttctatccttctaactttagaggctttctgcttctgtagaaaaagtaaggccaggcacagtggctcacacctgtaatcccagcacttggagagtccgatgggggaggatcgcttgaagccaggaattcgaggtcagccttggcaacacagtgagagccctatctctacaaaaacattaaaaattaaaaaaaaaaaaagcaggcaatgtggcacaagcctctagtcccagctacatgggaggaagctgaggttggaggattgcttcagcccaagagtgcaaagttgcagtgagctatgatcatgccactctcctccagcctgggtgacagagtgagactgtctctaaaaaaaaagagtgagactctgtctctaaaaaaagagagagagagattaagtgtggccttttacttattcatgcagaattgtgagatttcagaaactctaagattcattcatttcaacatcagaagacctgagttcatgccccagctccactactagattgtgactgaccatgtcttactctccttggtatctgttcctagtagctaagtatcctcgaacaaatagtttggcatctctggccctacatgtcctcatttatgcaatgagaattctaccgcacaggcaaggtcaggtggcataatgtatgtgaaagtaccctgaaaattgtcattcactatacagttcctggtaggagattatttgtgtgaaatttcctgttacccctgagaaattaragaaagaaaaacaatcctgtgttacatgggcctctttgtgggataatggggatgagcagtattcgcttttcttcccaattagatggtccacataccttttttctctagcctaccttccttatgtgtattattagacttacaaacccacccagagagtttggacacctgtccacaatgggcagcaaagtcccaccaggctttcccacagagacctcccgtccctctgagctggcccatgggtgagtgaggcccagccctaaggacagcagcacccccacagctttggtggacagcacaggcatgccagctggggtacaacagagaggaagcttayagggaagttataggcttggttatggggagagaattaatacatcaatstccttcagttctttatcccacaataccttaacacggtgcttgtcatataagcctttaataaatatttaccaaattaaggacaagaggaaataagtaagaggaaatcctgatcctggtctacacaactttcctgctgatgacaacacaggcccaggtgactaagagaacccagtttaatcatgtgagtcactgtgaagaataagcccctggctgtcagtgtcaccatgaaggacatcagtggggcactaaaacgttgtgcactgttacaatacattctaaaagcttgaagaagaagggtgagcttactgaagaacacacagtatattggcttgcttgggctgccatatacacagtacacagtacacrgactgggaggcttaaacaacagacatttctttccttacggttctggaggccgcaagtccaagatcaaggtgtcarcagtgttgtttcctccgaggcctccctccttggtttgcaggagtccatcttctccctgtgccctcaagcgatctttcctctatgtgtctgtgacctaatcccctcttctttaagtacaccagtcctattggattagggtcactcatgtcacctcgttttaactcgatgacctctgtaaaggccgtgtctcttaataagtcccatcctgaggtgctgggggttaggacttcagcatragaatttggaggaggacataatttagcccataacagtctacagtagtatgataaacaratggtctttccctgctgtatatrctttgtatgctaggtttttttaakttggagattttataagaagaaaaattattcataactatcattcacagtgkatttcatgttgacacctttttcttttatgctttaggtccaccgggccccaggggtccaagaggtgacagaggatcccagggaccccctggcccaactggcaacaagggacagaaaggagagaagggggagcctggaccacctggccctgcgggtgagagaggcccarttggaccagctggtccccccggagagcgtggcggcaaaggatctaaaggctcccagggccccaaaggctcccgtggttcccctgggaagcccggccctcagggcyccagtggggacccaggccccccgggcccaccaggcaaagagggactccccggccctcagggccctcctggcttccagggacttcagggcaccgttggggagcctggggtgcctggacctcggggactgccaggcttgcctggggtaccaggcatgccaggccccaagggcccccccggccctcctggcccatcaggagcggtggtgcccctggccctgcagaatgagccaaccccrgcaccggaggacaatrgtaagtccaagccctccctccagccagggggacagggcagtgcatgtgcttgagactgagccaacccccagtgtgtggccccacccatgttatttttgtttttgtttttgttttgagacagggtctcactctgttgcccaggctggagtgcagtggcgtgatctcggctcactgcaaccyccacatcccgggttcaagtgattctcctgccttagcctcccaggtagctgggactacaagcgtgtgcccccacagccagctaatttttgtatttttagtagagagggggtttcaccgtgttggccaggctggtctcaaactcctggcctcaagtgatccacctaccttagtctcccaaagtgctgggattacaggtgtgagccaccacgtcttgtcccccgctgcatattatttaacagcaaaggcatcataggggctggcacaggagccctgctgccagaacaggcctccataccaggcatgtgtttctctctaaacgccattgggttctctagtgctcatttgttttatgtattatgtgtgtatgtatgggacagggtctcactctgtcacccaggctggaatgacgaagtgaagtagtgcaaacatagctcactgcagctttgacctcctgggcttaggtgatcttcccactcagactcctgcgtagctgggaccacaggggtatgccaccacacctggctaattttttattttcctttttgtagagacagggtcttgctatgttgcccaggctggtcttgaactcctggcctcaagcaaccctcctgcctcagtcttgcaaagtgctgggattccaggtgggagccactgcacctggctcttgcacttgtttatttataggagccagccctcagaagacaaacacaatgcaaaacatttccttcagggaagcctgctggccrccctgagcgctcttccctcgttttacatcctcactctggagatagatgggctccctcggttagctccatcaacatgyggatggaaccctctgctattgatgactacatttaatttctttttgagaaaggtgttagatgttacggtgccttctagtcttttgataattaaacctttggcaaaactcgaatgtttggttagcaaccaagcctatttttctctcctttgacccaaccgctattctacttgattttggtcggtgaggcccgggttatttttgttgatccgtgagcccagttttggtgctgggttctcacatccaagtgttcctgggttccgtatgattccagactgacgctgaacatctgtgcctgccctgcttcttgttgttgcttctgttatttctgtcattgtgaagacggatccagacacagaagaacaaagacccagtcaaagatcttttccagattatgtggttttggcttgtgctctgcagtccactttgggtcatgcttgctgcgagcacgtccgtgaacgtcagctgtgggcctcgtgcagggacgctcaggctgctcccagcgggaccacagttttggcctctgaaacacagctgaagaaaggcagagtgctttctgtgatcttttaatcaatgttttccacttttgcattcctaggctgcccgcctcactggaagaacttcacagacaaatgctactatttttcagttgagaaagaaatttttgaggatgcaaagcttttctgtgaagacaagtcttcacatcttgttttcataaacactagagaggaacaggtatgcctgccacatacttggttggggaaaactataatttaaggayagtttacatctggaaattgcaggcttgttggggattcagagatatcacgaattcctagtcacgtaaacatgggaggcaacattacagagatttgggtttcatccagtggctagaagcattcgtggcattggaattgtatcttcatgattcttcctggaagatattgcctatcaagcctggagatgtgtggctccttctggtggctgttgaaataattataatgcagagaagcttgagggctgccaccaggcacctgtggggacagagagaggcatgaacactgtagggatggagtggggtgcaagggaccacgcatggctccagaggagtcaggaagagcgaagaaggctgaggaggcagagcccacgcatgctaatgctagtgtccactcattagaccctctatatgccaggcaccgtgagaggcatttgcycccttgaacctcacarcaaccctagaacataggtattattattaycctcatttgacrgmtaggaaaactgaggcccggcaaggtttatgcagactgagaccaaaactgcagcccatctagcaacaatgcagcgctttctttgataccacaccaattcyagtggcctcctcccttctccctaagttatctccagcagacacaatcctgtaaacagatgtttcctgtagtaactgactggaatgagcacacggcagacagtgaccaagcacctgggctttagaatacacagaccagggcccaagcccagctcagctacttctcatgtttgttcagtgggttgttataaaagcttgragacacactgcgtgcaacacactgcacgtggggcccagcccagaggaagtgcccaagaatatcatgactattcctatgattaggacatgggagaaatgggtgggtggtaggaggaagtgggaccaatggacattcactgggttgtctgagtgatttagaggaagagcctcactttaacatccgttgtaaacttrtaagaggaaaaaagtcaaagccccccaaacagcacaaaacaaagcaagtagcaagaaaaaagcagaaagcaaaagcaggctacacattctgacaaccatcctcttttaaattgtccttttttctaaatgttaaataaaagaaaaaggcctgaracatctgttctgaaaaatagtcacrcaccacccctgctttgtttttcagcaatggataaaaaaacagatggtagggagagagagccactggatyggcctcacagactcagagcgtgaaaatgaatggaagtggctggatgggacatctccagactacaagtaagtactcagaagcttccagattggtggtcaggctctcactgttctgttgtcacttcttgcccgactcccaacagtttcttccttaatgacctcgtgtcctagacgctcctcccaaaccrgggctcctggtaccagttgcatatttcccctggggaaatygtggttgacagttgatacgctgtcaaataaggctttcctttcttcttttcatggagtgaattttttttcatttctaagaaaaaaatcatgaaactcataaaaccacacagcataatacttctggccaagtcattttctttaaatgctatgggaaaagatgatgaagcccaggcaacctcaggcatgttcagcgttcgccccaggcgtgtttccaaggactggggagctcccttcaggatcacactgtgggtgcccctgacccctagttgggcttctaggcagagtgtgattagaaactacaaatgagtaattttcctggctgggcacagtggctcacgcctgtaatcccggcactttgggaggctgaggtgtgcggatcacttgaagtctggagttcgagaccagcctggccaacatggtgaaacctcgtctctactaaaaaamcaaaaaaaacaaaaattagccggatatggtggcgcatgcgggtgatgccagctactcgggaggctgaggcagaagaattgcttaaacccaggaggcggaggttgtagcaagccgagatggtgccactgcactccagcctgggccacagagcaagactctatctcaaaaaagaaaaaaaaaaaaaaaaaactacaaatgtgtgattttcctactcatagtaagttaaaatacactataaacaaagttgcatttgcgggataaccatcccctagaggtttgaagattccccataagttccatgtgacctaagttctatgaaaggagcaacaaagaatagaatcactttgaggtaccttcttggataacctagaagtctccagggcctcatcctaccctagggggtgttagctccttccctaattctacccaaagatctaacaatgactgtattgcatcagtttgattatcacatctccatactctggctttgcctctgacgggtgtgaaaattgcaaggaactgtaacaaatgaagcagaatttataaaaaaaataaaattaaaaaaaaaamaaccctctgagtaacctttagtttgctggggacggagaggccagaccctgcagggctccaccaggcacaggagcatcaccgcattggaagcaccttctgagagcactaggcaaagtccacggtgtggcctctggggctgtcccaggagaggagaaaacaagggtgtttcaggcctaagagagtctcatgggcatggaggcctagccctgtatcagctgagcagcagggaggagggtcagaggtgatggagaagccagatcgagttttttaaatgtccctatgtgcgtgtgcatgtgcatttggataaacaggctcttttgtactttcaaattctccatgtgagtaggatcagaggataaaggaggaaaccagaataaggccatctctcttttgtttttatttgtttgtttttaagggacaaggtctcactctgttgcccaggctgaagggcagtggcacgatcatggctcactgcagcctcttatctccccagctcaagcgatcctcccacctcagactcccaagtccctggaatcacaggtgcacatcaccacacccggctaatttttaaagtttttggatagacgtggtccactatgttgctctggttggtctcaaactcctagcctcaagtgatcctcccaccttggcctcgcaaagcactgggatcagaggtatgagccaccgcacctagccaggccagctctttataaaaaataaacatgtggcgaaatattgatttggaacattagaagattttaggtctgctctgaaggtgagcctcagactgcccttaagggcaagtggatatctgctgcaggcctgtcagagactcgtcggctcctctgcgcctgtcctggggagaggaaggggtaccccctggcataatctggcacttgagactttgcctgatgagccaaggaaagtgcccaacacagcagggacacactttaggagactcawaacagttgcaggaatcaccatctaaaacagtagctgtagaaggttggagctggggatgggatgggagacagagactgttttttaaaaaagacaaaattctgcttttttgacagccaagagcgccggggtcttttttttaagagagttgggagaagctgaaacaaaaaatcatcttctccacatttttcactgccgtaaatgcacaaaggtctgggttagactcactaagaaattcaatcttaagcctttccccaagaaaaaaactggattggcccatatggaatggattgagctggaacattactgtctatgccagctctcccaatgtgaaatttttctcctcttccctggggtccagcaagaattacatgatctggatggagcgcacccgcttggtacccaggacctgagaagaatgacgtcaccagacaccttactgggcacccagtccccaaccacagccattttggagcctcccaaatcctcagcttctgcaccccagccaccacacaggctgtgcttctcgttttccacccaaaggaatacataggaacataaaaatccccaggatcaaattttaaaagcaagaataagttagacaggcgtgttatgaggtctcaataaccaaaggctaatttaatttgacatgtaataataaacattgcacaaactagaaagaaagccagtgcagccgagggagggagtgcatcagctagatgctagagggatctagcatcagcaagatcggggttctgggccttgacccagcaacactcaaagctgcaaggcctcgtgtgagttgctcaactctgcaaaacctccatgtccccatttataagatgaattttccaaaatacctatgtcagtattgtgaaaataaagtgtgatagctgtatgcaaagcatttagtcgagggcttggcacataggaagtgctcaagaaatagtacctgctggtattggtatattattgctattatcatcataattattatcatattagttagcagttgcagataaatactacatagaatgtatatattttacagtatcctgattgggatgtccacacagtgtctcactcaagtcccacaacaggtgtgtgaagaagacaagaaaaacgttctctgcatggcctgggaatggggactgggcttcaggctctcaagggtctcctaccagcataaaccgccccaaatatgtctcctcctagtcagactcacttttactctccttgtctttgcatctgtggcctccaaggattggcccatccacctccctttcccctgccgccagcagtgatttctggaacagatcatcgcaggagacgattatgaacaattattcaccaacaaattggatgacctagaagaatggataaattcctagaaacctacagcctaccaagactggatccagaagaaatagaaagcgtaggctgaggtgggagtatcatttgaggccaggagttcaagaccagcctgagcaatagagcaagaccccatctcttaaaaaaacgaggaaaaaaaaaggaagaaatagcctggccagcctaataacaaagaaggagattgaagtagcaatcagaaacctcccagaaagataagcccaggaccagatggcttcacagccaaattctaccaaacattcaaagaagagttagcaccagttcttcttaaactcttccaaaaaatagaagccgatgggcctggcaccgtcccatcccttgcccaggctaggaagaattaagtaccactgctttccccttattcttttctcccaacacgcgtgaaatccttttaaaacagtttgcaggttttgtggttactgttaaagagcaaatagacgagggataaaaggctctctcctctgcgtctcggcctcacctsatttttcatgctgagacctggttgagaaagagagtgctggaacagacagaaggcaatagtgacatggaacagaagccaaaggcttaggggacacacagattgagctcaggcttatttcccatgaaacactcaacctgacttgctgaatcttatggctctttctgcaccgcagcaggacaggaccagctgaggggaaagggtggcgtgagatgccacctgcaatggcccggacagttccaaggatgggtccccagatgctttggatccacacaccaatacaatttcaaaagaaagactggcagggccaacacagatcagcaggattttatttgccaattaaggacaaggcttttagaaagtaccaatcagcaaatctcagcattaaaaaaaataataataaacctataattatttccaagaagagatggctggccatcttacattcacacacacacacattgtccttattcttctcatttcaccaggtcctgtgaaaacttcattcttggccaacacccagcccctgactggagattagagtccattggcccacagtctcatgataacatttgatggattatcttgaagtgtctgccatgagccagcctctgtgctggcctgcaggatcttttctggagtgtgggggcagcagtatgagtgagcagtcgtcattgggatcatgttttaaaaaggcaggtttccagggccatgtcacagtcaatagaacatagcaaccctaactgtggatacagcaaagaacaggccttcaaaggagatttcaacattcccctctcaattactgatggaaaaattgatagggatatagtagacacaatcaactgacttgacttaattgatatttgtgggaygttttacccaacatctgcaaatacatattcttttcaggtgcatgtggtacattcaccaagatgaactatattctgggccataaaatacgtctcaataaatttaaaaaaaarccaaaactatcaggccaggcatggtggctcacgcctgtaatcccaacactttggggggccaaggcaggtggatcacctgaggccaagagttcgagaccatccaggccgacatggtgaaaccccgtctctactaaaagtaaaagacattagccaggtgtggtggcggatgcctgtaatcccagctactcgggaggctgaggcaggagaattgcttggacccgggaggtggaggttgcagtgagctgacatcgcaccacagcactccagcctgggtgacagagcgagactccatctcaaaaaaaacaaaaacaaaaaggaactagaactatatagagtatgttttctgaccaaaataattaaattagacatagatagaaaaatgtctgtaaaatcccaattattttaaaccacacatttctaaataacccatgggtcaaagagaaaaatcacaaaggaaatctgaaaatgtttcaaagaagatgaaaacatatcaagatctgtgggatgcagctaaaatagtatttagaaagggacacttatagttttaaattacatatattagaaaccttgtttaaaggttgaaaatcaatgatctaagcttccactttaccagggtagaaaaagaagaacaaattaatccctaagtaagtcaaaggaaggaaagcagtgaaatagaaagaccaacagtagaaaggatctataaaaccaggaacatgtcaaagttgatcttttcctttgggaggcgaaggcgggaggattgcttgagcccaggagttcgagaccggcctgagcaacatagcaagaccccatctctacaaaaaacttaaaaattagctgggtgtgctggtgtgcatctgtggtcccaggtattcaggaagctgaggtgagaggatcacttgagcttgggaggttgaggctgcagtgagctgtgatgacacctctgcattccagccttggctttttttcttttttcttttttccgagacagaacaagactctgtctcaaaaaaaaaaaaaaaaaaaaaaaaaaaaaaaaggctgatccttttactcttggtgtaatgagtataggtgtaagcatgtgattgggagactgtcattgttaatggaggctgcctgctagacctgcgggagccggacacatacgggacctgggtacttgcccacctgctcagagcagaatgctaagggaggttgttaaggcctctcttgcctaccctgcttgcagttgcccaccttagatcaccagagatgtgacagtcttcctgagaatctccccaaacgcactagaagctcttctgttcctctgtccacgggacctcatttggtgggagtgtgctgtcacactacgagtcacagctttcatcttggcatcacaaagataaaatgtggtgcctttctgtctatgcagactgctccgtataatatcatacattgtgttttcagttttttgtgttttattttttattttttaagatggtctcattctgttgtccaggctggagtgcagtggcacaatcacagctcactgcagcctcaacctccgaggctcaagtgatcctcctactttagtctcctgagtagctgggacttctggcatcagctaccatacctggctaatttattttaaattttttatagagatggtggtctcactgtgttgcccaggcaggtcttgaactcctggcctcgagtgatcctcctgccttagcctcctgaagtgctgggattacagtgtgagccactgcgctaggctgaattagaagatgttaaaggttctgttccaggctctttcattctatggtcctatattctaaatcctatttttttcttttgagatggagactcgctttgtcacccaggatggagtacagtggcatgatcttgggtcactacaaccttcacctcctggcttcaagcgattctcgtgcctcagactcctgagtagctgggactccgggcacctgccaccaggcccggctaatttttgtatttttagtagagatggggtttcgccatgttggccagactggtcttgaactcctgacctcaggtgatccacccacctcggcctcccaaagtgctgggattacaggtgtgagccaccatgcccagcctctaaatcctattctaagtatcttatatttagatatatatatttgatgtgtgtgtgtgtgtttccagcttactggagcaatcagtccaagcatttccaagattcctggtgttttcagagtgtgatgtccaagtatatgtatgtgctgctaccgctcacttctgtgacatgtgtatgataatgtagaattcagggctttgagccccagacttcagccattcatcttgccagaatctacctgtgaatgaggttaagcactatttaagctgacattcttctccaaaatatatacattttgcttatttgacacgttacgttctatattattataaacatgcagactgaggggttttgccacaaatcactccatgtgattttagctttgccaaagagatgctttgagactctgggtggtcagcccacagaataaattgtcccttcagtctggcttcaggctacccactttccacccattctggcctactgcagtcacctccgcttatggccacagaactgcattctgcttttagtcctaaggaaagccttgagtactgtatgtgaagaattccagtgacctggaaaaacaaatggagaaaggcgataargattatctcctttcttatcactcagttatttctctgcctggttgatacatcctttttatttatttaacttaaaatgacttaaaaggaaacgcaaggggaaaatattaagcaggacttctaagcccaaagaagtcatatttatataatttcccaattaactgagaagtcaagaatatcaaatatcctatcattatacattcaggaatcatagatctcaaattttataaacaaaaatggaatcaaaccccccatattactggcagaaatgaacgaaatgtatgtccacaagattaaactgctcaggcattgttgacatctccagaagaatctcacaaggtgaaaagagttacacaaaaaaccaaatgtgaaagtaaactacttttctttccaacttcatctctatctggcgtcaggctgagattgtcacaggctgagattttgaactcattgtgactcatctgttatgtaagctgtaagagttgggactttgtctcttctctgcactgctatgttgccatcacccagatgatacctggctcatagcaggagtgctatggatgcctggtgtgagtgagtgagtgagactattttctaactctcccttctaagtagcatcccatttttactctcaccaatcgatggtttcctctgaattctctttcatcactaggtttatttaattgaggccactcaatgtatatatatatatgtatttttgagatggagcctcgctctgtcacccaggctggagtgcagtggcatgatcttggctcactgcaaacctccacctcctggattcaagcaattctcctgcttcagcctcccaagtagctgggactacaggtgcctgccaccatgcccagctaatttttgtatttttagtagagacagggtttcgccatgttggccaggctggtctcgaactcctgacctcaggtgatccatctgcctcagccccccaaaacgctgggattacaggcatgagccactacgcccggccttcatactcattttttttaaatcccaaaatacacatttggtgtgggggagtcagttctaccctgtccccaccctttgactaaacttcaactgtcctttcccgctgcctctggttttgcgggtgttattgtccaaagatacagggccatacaggctgtctcctcgggtgacccgaggacaccctgtggccagtgcggtaatgagtcattgtttataggaagcaccctscgctgcagatgttcttccagaccctccacatgaggcaggcttgtcctctcaggcagcagccacaagcttctgtgcatgaatctgcttcttagacaagattgaaccttcaaggggtgagtctggaagcacacctgatttattcgtggaaacgtaatcaagaactgttatccatggcaaggtgctgttctgagcarcagcatccaagttaagaagccccatgtgaactcatcctaaagaaaacttgtttttaagaatctctctcccaaaaaagggagtgaaatgtaggagtcattttcagtaagattaagttactatttctttctaaagcaatcaaccttctacaactcamccagacaatcataaccagttatttgtaattgtaggttcttgtaaatgtatatcaaaagtctttcactttctcttcctggctcttggacttgttagaggcaagatattgaaatgtacaaggtccctctgggttctcacaagwtcatgtgtgcgtgtgtgtgtgtgtgtgtgtgtgtatcatgtcctyataatgaatagatattcacacacatatahacactcatgcccagaagtcagcattccagtacacattagaaagttattcatctaactgtcccaaagcaagattcgctccctctgcattctgatgaaccagcctagtgagtttggttcatggtagcaaagatcacaagcgcgcagggagatgccgcrttatgcattactctgcaaaacagctgctcctttctctgaataagagcatgtactgatttttaaactgcattttcattccaggataaatgacatgcttcaattttgtttttttatattctctgctgctcttgagtaaagaaaagctctgcattactgtgcaaataacattcaatttctgttttgctaaaagaaattggaaagctggacagccggataactggggtcatggccatgggccaggagaagactgtgctgggttgatttatgctgggcagtggaacgatttccaatgtgaagacgtcaataacttcatttgcgaaaaagacagggagacaggtgagcagtagatgggatttaagagggagctgccagcttatgtcctatgaaagggtgaggggtggtgagtacaagggccctgaatgcaggcactgcaattaggtttcagccctggttatgccatttattaactgggcaggtgattaacctcagggaaatagtaatagcatcttcttcacgaggttgtgaagatttaaataagttaataaatgtgcctcacatgtaggaagtactcaacgaatgctaaactaactgacccacataagtatcttatattgtgagttaattgttctttaaaatatagcaccagccaggcacggtggctcacgcctgtaatcccagcactttgggaggtggaggcgggcagatcacctgatgttgggagtttgagaccagtctggccaacacggagaaaccccatctctactaaaaatacaaaattagccgggcatggtggcgcatgcctgtaatcccagctactcaggaggctgaggcaggagaatagcttgaacccaggaggcagaggttgtggggagccgagatcgcaccattgcactccagcctgggaaacaacagcgaaactccatctcaaaaaagaaaagagatatascaccaatgttagttcttttccgtagacatccatacacagctaatccaggtggccaagcrttcaattccacgtgtatctattgagcatctactataggccagatcctgtgatacataatagagggagatggtctgtgctgcttatcagctcataagccaaagcagcttttggagattttcttgacttcaaaggctatgtatctaaagcttcatttaacacacgaccctctttggaatgtggcatcttagttttcttcaccagaatgagattaaaagtttgtgataggggacagaggaaatggggaatgaatgctaatgggtatggggtttctttttggggtgatggaaatgttctaaaattagattagattggttctaaattgcataactttgtgactataccaaagaccactgaattatatgctttaaatgggtgaattatacaatttgtcaattatatttcaataaagctgttcatataaaaacaaaaacctcaaatatattttggtcaaactatttttggaagtaactggggcataaattatccgtattgccattcaacagacagttactgagcacctttgatgtgtcaggcattggtccragtgctagggaccttaagacacataggaactcacagctgggtcagttgagsgggaaaaacacagatatctaaacaagggattataattgatggtgacaagtaactcagatttgtcttttgtatgctttgtttggccatttgggatttgagtagggaccaggctttcccagaataggcttttcaaaatgaaacttggcttttcaaaatgaaacttatcttttcatccaaataagatcttctagacatttctttgaaaatataagcattgttgaatgatgtattttagacactgtcctataaaaatacacgttccctttttttgaattgcacattaactttattatttaagaaaaactaatgcccattcttatttctctcttttagtactgtcatctgcattataacggactgtgatgggatcacatgagcaaattttcagctctcaaaggcmaaggacactcctttytaattgcatcaccttctcatcagattgaaaaaaaaaaagcactgaaarccaattactgaaaaaaaattgacagctagtgttttttaccatccgtcattacccaaagacttgggaactaaaatgttccccagggtgatatgctgattttcattgtgcacatggactgaatcacatagattctcctccgtcagtaaccgtgcgattatacaaattatgtcttccaaagtatggaacactccaatcagaaaaaggttatcattggtcgttgagttatgggaagaacttaagcatatactgtgtaaacagtgccatacatttctaaaatcccaagtgtaggaaaaatatgcagacatacagatatataggccaactattagtaataatatgaaatatacttaaagagcttttaaaactttgtatttttgtacaaaatatttgtcttttacaatttttttcctttttttttttttgtcattttaccgacataatacatggagccaaagaaaacaataatggtactaataaaaactcctaggktttcctgtcagatttaattctacccagtggcaaagaattttttcaattgtggctttaaaaaaataattaaatatacatgtatatatatatatatatatatatttttttttttttttaatgtttcatttcctcagaggaaccaatcacttggaatgtctagaaatayccttgcagattttgccagtgtcaatcaagcctgcacacatgcacagtgaagcgggctgtgcctgccttgagcccatcaccagccaacattcttgacgtgtgcctgaccagacacagaagaaatgggcaactcaagacgtgcttccacttcattttggtggagtcgggaggtgtrggggatggagaggcatctgttgggaagggcactgaatctggcctatctggaaggccctgtgtcatggctgagctatgactgtacttggcatcagatccctacagagccaacattaactgtcaggaacgtatggcgtcacatcagccaaaggcagagatgctagaaagatgggaaccggctacgtgttacctggaaagtttgttttcttaagtcatattccaaaaacataactccaaggcatacgcatgataaaatgcaagaataaacttttggccactttgtggaactcttaaaagaacctttccagccgggcgcagtggctcatgcctgtaatcccagcactttgggaggccgaggcrggcrgatgacttgaggtcaggagttcgagaccagcctggccaacgtggcaaaaccccatctctactaaaaataagaaaattagccgggtgtagtggcacatgcctgtaatcccagctactcaggaggctgaggcaggagaatcgcttgagcccaggaggcagagattgcagtgagccaagatcgcaccactgcactccagcctcggtgacagagcaagactccatctcaaaaaaaaaaaaaaaaaaaaaacctttcctctgagcccatcttcctttcgctccttgactttccttgacttgctgttggaaagtctaatatgaaaagggctgaaactaggcattaaatataactgatgctcaaaggtaagatttccatccaacagattccttctccctcccaagggtcttcccaggcagtgctgctacttatcccaaataaaatggtaaaagaataaagacagccgggcgcggtggctcacgcctgtaatcccagcactttgggaggccgaggcggacggatcacaaggtcaggagatcgagaccatcctggctaacacggtgaaaccccgtctctactaaaaatacaaaaaaaaaattggctgggcgcggtggcgggcgcggaggctgaggcgggagaatggcgtgaacccgggaggcggagcttgcagcgagccgagatcgcgccactgcactccagcctgggcgacagagcgagactcatctcaaaaagaaaaaaaaaaaagaataaagacagagtttgactttcccacctgcgaacaagtggactgtactgctttgcccacagtctccattccccattcatgctgttttcacagcccagtaatggccaactgctcagcacctgtgtgccctgctgtcaggcaggtgggacccacagtcctctgggcctaaactgctgaagcctgcamcacaaggcgggcacggcattccaacacctcttcaggctcaacagcctttagaggctacactgagtcctctttttcatgctcttcctggttttcaagtgtcaattaaaatttgtcttcagaagaaacttgaaaataagtatctgatgccgtcatcaggatagactagtattagctttcgcagctgaagttattgctctcccagccctaataataacttaccaagtgcttattatttatcaggcactggtccaagtccttcaatcagattgtctcacctgatcctcccaacagccctaggaagcaggtcttactacactccccatttcacagggactggggcttggggaggtgatgcggtttcctgggtcactccattactgagtagtgagacaggattcagacgcaagctttgaaaatgttctaattttctttagaaggaagggcccttcttaatagcacactgaataaaatcaaatgaataatcacacattacaagatgcctcctatacgtctctatatttagctacttacataccaggtttcttttttgtttgtttttgtttttaagacagagtctcgctctgtcacccaggctggagtgcggtggcgcgatctcggctcactgcaatctctgcctcccaggttcaagcgactctcccgcctcagcctctgcagtagcttagggactacaggtgcgtgccaccatgccaggctaatttttgtgtttttagtagagacacggtttcgccattttggccaggctggtctcaaactcctgacctcaggtgatccacccgccttggcctcccaaagtgctgggattacaggtgtgagccaccgtgcccggcctacacaccagctttctattcacctacacacaactgatgctcttttggagtggagagttttagtaaaatatgatggggtcttcaggcacctgagttgctacttactactatgagaagatagaaaatgttttttcctctaaacagcttttgaaagaatgaatgcacaacaaggcaaaaaataaaaactttcttttccttttctacgatcaatgttcaacaactcgttccttccaatttgtaacagagttgaagctgaaacagacaaaaaatagtaatagctgctcccatttaaagaaaaatgcttgaggaaacagctgtataaatcaagaaacaataccaagcagatgacgaaactgatctcttcttgagaacgtaagcatgttarctcattcgtgactcaaagtcatgtaataatagttgacatataccacttttcacatacattatcgcttccagtcttcacgcacatctattgttcctgcttgagaaatgaggaaactgaggctcaggttgaagacttgcccatggctcacgtatctgtcacagtcactttccaaaaagcaaatctgatcaggttccccactcaggtccccaaatctgaatccatcctacctctcaccctcggcttaaaatcttccaaacaatcctggttgggctcaggacatacctgcaggggccgtaaggcacttggtacctggttcccaactccaagtctagccttctttccaggtgggacccatcacccatgccctggcactagcacagccagactatgcacctgcaccttccactagcctctttatcacctccatactccccctgggttttctttccctgcctcctttacctggaaaacacctcctttaagattcagctcaagcatcacttcttatctgaatcctttcccaacaaaccacacctggaggtagaactggctcctgcaccaagtgctctgggtaataaaagagaaaaccccttcactgtgttagataatctacaggttagctgaaaagcctaaaacttaatgaattaagacagaggccaggcatggtggcttatgcctgtaatcctagcactttgggaggccaaggtgggaggatggctcaggcccaggaattcaaggccagcctggccatcatggtgaaaccccatctctacaaaaaatacaaaagttagctgggtgtggtggtgcttgcctgtagtcccagctactggggaggctgaggtgggaggaacacttgagcctgggaggtcaaggctgcagtgagctgagattgtgccactgagctccagtctgggtgacagagtcaagaccttttcgaaaaaaatattaaaagccaggcgtggtggctcacactgataatcccagtactttgggaagccaaggcgggtggatcatggtgaaaccctgtctctactggaaaaaaaaaaattagctgggcgtggtggcaggcacctgtaatcccagccacttgggaggctgaggcacaaaaactgcttgaacctgggaggcggaggttacagtgagctgagctcgcgccactgcactccagactgggtgacagagcaatacwccatctcaaaaataaataaaataataaataaataaatagagaagccaaacaggagaagtgaaggaattcatgatgttgctaatagttggtgcgtgtgtgtgtgtgtgtgtgtgtgtgtgtgtgtgtgtgtgtgaatggaagattgagtaaaggaatcacatggtaaaccagactcattctcttcattctctttaccaaaatatggccctgagtcagggaaacgttttagaacccgtcctaaatggcagtgtgatggggcatctcatttcttagtcatactcaacagttttagaagtacaagcaaatttttcagtctttctaagaatctgtttctttgtgcaataacttcatttttctcagaagaatcccttaagggcatggcatcatatttattttctaagtcacaaggcagatgttgacaatattttgtttcactctttcatccttcctctcctacatacccctgttcaaataagtatgtagcatgcacaggttatgccaggtgagcagaaggccagagggaagcagacctatgaaaaccaactttaatttctcagaggttttgagtggttttcacattttttcagtgaatgagtatatgaatgaacgatctccagccagccctgccttcatagccgggattgtatcccagcctccagcctcctccaaggacttactagccttgagtttgcaaagcaaggatcaccgtgcaacttggggagggggtcagctgccagggcgggggctccttctgacaattcatccagacaggtaattaaatgagcttaaccaaggggtctccatttagtcctctgggccagggatggagaattgtccattkgctggtcttctaacatttggtgccagaggtttctatattctttaatcatcactcattgcctctaccccactaaatcatgccyggaagcttcagggagttgtaagattcttaaaatcaattcctatgccatggagcaaaggagctggatcaggcatgacataaataagtacgaagtgctggctctggaatagctattataacacctactgtggttaggaagttgacctatattatctccagctcctatccagggaaactgaaaatcaggctggttaaatagttttcccaagaggtgggatttgaacccattgtctcctggcttcctctctgtcatgctgtcttctgtgttttaacactgatcttattgactgcctgggctttgtgcattgtattctgttcttcttggccacaggaaacagaccagccaccaagaataccctctttgtgaaagaaccagggaggtgtaggaatcctgatttgcacactttagataaatgcactgaccaatcccttccttgtcaatgagcaaagactgattttggcctccaatgctatggttgtcagagagatctaatttggagaaaacaccctagattctagagtcactgagcctctcacagagtcctctactttaattagtgttgaatgaatggagcatgggctttggagccaaacaggcccaggtttcaatcctgctctctactttctttttttatgtatttatttatttttttgagacaagagtttcactcttgttgcccaggctggagtgcaatggcacgatctcagctcaccgcaacctccacctcccaggttcaagcgattctcctgcttcagcctcctgagtagctgggattacaggcatgcgctaccacgcccagctaattttgtatttttagtagagatggggtttctccatgttggtcaggctggactcaaactcccgatatcaggtgatccgcccgcctcggcctcccaaagtgctgggattacaggcatgagccaccgtgcctggcctcagtcctgctctctactttctagaagtgagacgtattcaaacaaatggcagatagctctttccctcctctttcctcttacgccaggtcccttgcccacaaaaagaacaagtcctggcattgcttgtcctgatagcattaaggaagtttgctttgacagttttctcactgagaatgcttcctttccaaatattggagagggatgacatgggaaaaaaactaaaattatggtatctctgcacctttaggccagtaaatgctgggaaaaaaatgaagtcgtacctctttgtgtgtcatctcttctttgggtatgagtgtagaagttcctatcaatttgtattaaatatagatttggctgctgaaataaagacccaaagtgatagcaggtgaataagatagacgcatctctccctggccctaattttacgtatgcaactagcccagggagccgcactgtgactatctcgttgtcctgcagtctctcagccagtgccctcgtttgcattgtccaaaagggctcagcaccacatccacagtccaggcagtgggcttaagagaggggtgat

SEQ ID NO: 8805 - DNA, 43103 bp, Homo sapiens
agcacagccttcctggggttccttttggaaatgctgacttattaaataaatatgagggaggagtaccctctgcaaggagagaaggtggggaggggcacaggaagactaagcactgtcttcatcattttgccatgtcccgctagtggccatgagcagccctgtccctgggtctatctcttcaggcttatgatcctatttaatcctcatgacaaccgctaaaggtagmcaaggttgcccttgtttttcagatgaggagtctctagaaaagtcgtgtggcctgctaagctaactgttcagagcctgggctctggagtcacctggcggtggtttcaaacataaatccggccccctcaagagctgtgtgactttgcaaatgttccttaacctctctggccctctatttcctcctttgaaaaggagagttaaaatcttgccctctcggcatgaggttattgggaagaatcagaggtatgattgatagggtcatggcacagtggttaagagtatgaaccatgatcccagatatcttgggtttaaatcccacgtctgctatttaccagctgtgtgactttgggcagtatacttaattctcaggttttctatttctcatctataaagggaacatcattatagtacctacctcataaagttgttatgagaatcaaatacatgtcaaatccgtggtacaggggttgacaacagtaatccaagtttgctctaatttgaataaacgcagttcttcttactatactgtaaagactatatctgaccaggtgcagtggctcacgacctgtaatcccagcactttggaagtctgaggcaggtggatcacttgaacccaggagttcgagaccagcctgggcaacatggcgaaacccagtctccactaaaaacacaaaaattagccgggcgtggtggcacacacctgtagtcccagctactcaggaggctgacgcacgagtatcatttgaacccagaaggcggaggttgcagtgtgctgagatcacaccactgcactccatccagcctgggtgatggagtgagactctgtctcaaaaaaaaaaaaacaaaaaaaatactatatctggctacagtagtattcccaatgcctgccacatagttggtgatcagtaagtatttattttaaaaatgatctgggatttcaacccacatctgcataactcaaaacatttatgccagtgattctcaatgtatgatccagggctgtctgcctgaatgggcctgaccccaagaatcagagcccctggctggccagaactctggatttatcctctccagttcagcaataggctcacagtgtaacctgggccagttctccctctctaggtctcagtttccccatctgtaaaagtaagggctctctggggtgaggagctgtttatccacatgaccagccctgctccatgggggctcctggtatctcaagacacgcaaccttcaagccacaaaggatcgtcactgacgttactacttttattttgtaagcccgcatgtctcagggctcatgtgtgtgtgtctgtgcgtgtgcgtacacaggcacacattcagatctgcaggtgatgtggcttggggagaggctgccataaatattaaactcccaactccaaagtaccctgcagagattcagaactgcaggaattcataacatcattctctttcaagagtcagtgttctcaggagtgtgggcaccgtcatagaaaactatcgaaaaggagagtgaagcattagagaactgctgagcttggagggaactcggagctcatttagtcccttgttcccgaagctccaagcacaatccgtggtcagcagcatcaccctcaccagggagcttgttaaaatgcagaggctcagccccaagaggaacatgatggatcaagatttgcatctaaacaagatccctgggggacttgactgcacgtctttgtttctgaaaagctgtcctagtccccagccctcatctgcatttgggggaaacatgaggaacagagaggggtggagtttgttccaggtcccccagcccattaggagcagggccttgacaaaaaacctgtaagactttggaaaaggattcaaagctctctgcgagaggcaggcgtttgcacaaaagatgaataagtgcagaagaaatgctcagtgttgctaattgtgtccaacagggttcaggcaagaaaagagaatccaactgcattggttcttgggatttgaataaagtggctatttctagagttgggggacaagcttgaggaaaccaaccagggactgtttttcctaaggctcaagcagcaaagaaaagcatctgggtatcccagcccaaggagataataggagccaaggacaaggccttatcaggagggacacagccaactgccacacttgtgatctagagaagacagcagggaaaagtgccctgacatctgacctcctgccatgccaccctctggctgaacccaagtagagatgaggaaactgagtcacaaagtgcccaaagtcaccccgtgggggagtcaggattcaaatccaggccatctggccccagagtccataaagataaacataaggtttgtttattcctttggcaattatctactatttgctgctcagtattctagacactatggattccaaattctgggtttttcaaaatcttttcagtaacacttttgtagtgagaatattatcggtggcgagtccgcaacactcccagcccttgtcttctcagaggaaagaattcaattgagagacgcaggcaagttttaaagcagaggcaaaggtttattgaaagaagcaaagtacaactgagagatcaagtgccccgctcaacctttggctcggggcttttatacactggcttggttctggggtttcttctcctccttgattcctcccttcggtgggctgctgcgccctccctgcatgcgcaatggcctgccagcacttgggaggggccgcatgcgcagtgtgtttactaaggttgtgcgcatgctcacttggggtgattttcccttactggtccgtcgccgcaagaaaaaggtcatatacaagtcagactccaacatttgcccttctgctcgaccttaccagggaattgtggtttgctggctccagatgatgtcaactatctgttagggaactcctctccctcttggcgccattcgtggccacttatcatgtcagagggacagttttatgatcgcctgtccatcatttgatgcactgccatttctgggggccctctcctgcacaagaacacaataaacagccttgttaaaagagtccctatttcactgcaataagactgagtggtggccagagtggtagcagctgttgcttttgtggaattggatggacagcctggtaggagaaaggcccaggggttctgaccagcagtggggtcgtgctgctccctgaggcctctgctgggtcctgggccatcagcagggaccttagccagcagtgggcacctgcaggggtggaggccaggcctgggccatgtggcagctctaaggtccaaagattgctgctgtgggaaattcccacccctgcaaatgactcccagccagggacatccttaaactgctgccagaggaagagtgacatctatgtccccataagatccttatgctccagaatgtcctcccccactctcctcccctcctgggcaggctgaggtccaggaagcaaaggcccctaggcacactggggatgcacctgtgagccctttcctgctccaaagcctcccaaaggctggctccttaccctgaggcctctgctcagcttgttgcctcccaagagaaccctgccctgaccagagttttggaatggcatcctgcagacctggacttaaattcctgctgggtgactgcagcctacatcacttcaccctgccaaacctcagtttcttcatctcaagacaagactaaaatatccacctggggttgctgatgcaaggatgagaggagacgtgcagcttaaccagcacagcgcctgcacatagtaggtgctcaataaatatcagtttctttccaatttctgctgggtgctgcaaggatctcaggaaatggaagactcagccgtgcctgcaaggagccatcagactggtggtgtggggactgaggggagggacggatgaggatcccaacaaacctcagccccagtgacaggagcaacacggtacagaggagcagagaggcctggactgtggggttccctgtgcttaacgtgggacattctgatcttaacctcagtgcctgccagtgctgtttgtgacctattgggagtcaccctgttaatcccaccacattcagttggttgaggccatcatgaaaacctgcccaatttcaagggaagggggcagaaacattaccttttgatggaaggaatatcaaagaattcgtgggcatatttttaaaggaccacaattatcaaaaagcagagtggttaatgctgtggtggggaaagcgcaaagggttctgggacctcagaggggaccctttctagaatccagagaagcatgggagtggtcagggaaggcttcctgggggtgagggcaaagcagaactcacaaatgtaagcagggctggggcaaaactctaaaaattaaacacagtctgtactataaattttgttttccagaatgaaattttactatctttacttactgcgaatatatgcccgggaccatacccccaagaaaataaaaattttagaggctgggcatggtggcccaagtctataatcccagtattttggaaggccaagcgggaggcttacttgagctcaggagttcgacaccagcctgggcaacatagcaagacctcgtccctactaaaatacaaaaaattagctggacatggtggctcacacctgtagtcccagctacttagggggctgtggtgggaggatcacttgagcccaggaagttgaggttgcagcgagcgatgttcatgccactggactcctgcttgagcaacagagtagactttgtctcaaaaaatgaaaaaagaaaaaaaaattgtacgtatcaacaagcaaaaacttttttaacacttataattctacccccacaaccagagacaatgcctcatgactccttgctaaatattttccagattgttgaacatagaagcctattttgaaccccccaaaatagaaccttactctatggtgccattggaaacggatgcctcatgacatccctttccttgccaagaaatacctttatttctgcagcctcactttaagggacatgtcataattcatttaaccaatgcccttctggtggatacatgaggttgggtctcacttctcctgtcctgtttcccacagcatagcagtggtatcttggagcagtgatttactggcacactgactcaattatgtatttaagggcaagtccctgaaattgaattcctgggtcacagggcatgcaactgtttaaacatttgccaattgccttccagaaaatttcaccaccagcaaggtttgagaaacactgttttcccattgggggaaacatttattttttaaataaacgagccaatatattttaaaaaagagagtttggttggtgccagatgtagcttcactctcaaccctgccgtctgctgggggtgagatctcaagggagctatgtggcttttttgaacctcagtttcctcatctgctaaaccaggccttcctagccgagctcttaagagactggctgagatgaggcaagatgaacagtgatgaatatggggtctttctgtggggagggtggacagggatgatcataggagtcaggcttcctcatccactgatctaggcagtgaaaactggcttctaagtatgaccttatgacttcagtgatgtcgcaagcaggttccagtccctgtgcctccccttcccgctcccaggaacccatccagcctcaggaactgcccccagccatcgagccttggctacttaagggacctgggcccaatccacagytgggacagtcctggcccactgcactgggaatctaggatgggggccttggccagagccctgcygtccatactgctggcattgctgcttacgtccaccccagaggctctgggtgccaaccccggcttggtcgccaggatcaccgacaagggactgcagtatggtaagaagccacatctgctggctggacttggcaaacccacgctccaggctgctctgggtacagtggggacagggagtggggacacagaccggaccctctccctggggcagtgccaccttctgggtcaggtggctctggctcctattctggccttactgcccaccagctgagtgccctgggcatgttatttgtggtagtgaggtcctccaccagccaacagaacacagctttgcgtgcaagtagttgatttgggaaatgattccaggaaacactgtagggaatcggtactgagatgaggaagggagggcagccaggagagagtgtgcaattaaaccagccaccacctctgatgatgggaaccactcagctgggaaaattctgcgtaaagtttggaaacacatgcctctgaactggaagtcagaattgtggtcacctctagaggcaggcagagaccctgaagggcatgagggaggtctgccggggtgctggaagttgccatatcttgatccaggtggtgatcacattcctgtataaacattaaaaattatttagcaatacctttaaaatttgtgcccgttaggtactttatgtatattattcctcaattttaaagaatgggcaggccaggcacagtggctcacgcctgtaatcccagcactttgggaggccgaggtgggtggatagcttcaggccaggagttcgaggcaagcctggccaacatggtgaagcctcgcctctcctaaaaatacaaaaattagccagtcttggtggcagccaactgtaatcccagctacttgggaggctgaggcaggagaatcgcttgaacccgggaggcagaggttgcagtgagccgagatcatgctgctgcattgcagcctgggcaacagagggagactgtctcaaaaaaataaataaaaataaaacaaagaatgagcaaaagtaggagtatttttttttaaatactgaaacaaagcctcccgactatccaggtggcatgggaactgggatatttatacaccacagtgattgattgagggcttctgggccgggggtttgtcaactccccagcacttctgtcctgttgcatgtacctgctttctgcagttccaggacaaaaagcctcgggacatacaggctcagggaggcagacattggcagctgggagtcaactgtcactcactggaaagactcaaggatatggacaggcactgaccacatgtcttctcacatccctagagcctcaattgccttacctattaaatgagataacaacattcccttagatagggttgttgggagcccagactggctcgagacaggcagagggaaatcagggaaggattccaggatatagtaaaatggaaaagacagtgggaattacccagggacaaggggtagcgttccaggcggaaggaccccaacatgtgcgtttgctagagggagaagagcaaattggaaagaggtgaaaggggaggctgctggtcatctgtgtacccatgtctgccttggggacagaaacctgggcccctcagatctcggaacagtgggacctggtaactgctacttgcattgaaactgtaaatcagggaagtttctcttttgttcctttgcactgtgcacacacaccatgtttatgtaaccagtcctctgaggttggacattttggtcctttccatattttttttttttttgaaacggagtctcactctgttgccaggctggagtgcaatggcacaatctcagctcactgcaacctccgactccctggttcaagtgattctcctgcctcagcctcccgagtagctgggattacaggcacatgctaccacgcccagctaatttttgtatttttagtagagacaggrtttcactatgttggccaggatggtctcgatgatccacccgcctcggcctcccaaagtgctgggattacaggcgtgagccactgcgcccgacccctttccatatttttaataatataaaccctatttgctgttccaggcatttactgagtgcctgctgtgtgtcaggcaccaagctaggagtgcttgttatcctcacagcccccttcttgctttgcagtttcaatggcatgccaatgaggaaagtttagtttagtttagtttagtttagtttagtttagttdwgtttwgttttgttttgttttgttttgtttgagacagagtctgactctgtcgcccaggctagagtgcggtagtgcgatctcggctcactgcaatctctgcctcccgggttcaagtgattctcctgcctcagcctcctgagtagctgagactacaggtgcctgccaccatgcccggctaatttttgtattttttagcagagatgaagtttcaccatattggccaggctggtctcgaactcctgacctcaggtgatctgccctcctcggcctcccaaagtgctgggattacaggcgtgagccaccacgcccagcaaatgtattgttgtcattgctatttgacagatgaacaaagtgaaggttgtttggggactttgtcaaagtcacccagctagaaagatgccctctttctctagcccccagatccttccagtttcttctacacaggccagatgtcatggagaacaagaaggaggactatccgtccaagcgcacagcacttttgcccttggggatttgttggcaaaggcattccatttcctcatcagtaaaatgggcatgaacctaacaatgccacagaaatgcagggacacctctgaatgtccctcatgctacctggcacacagaggggctcatatcctgtcattgtacttaatgctaataaggatgttggcccctctcttgaggacaggtgggagccaccgtagggtttagagcaggggaggaggcaggcagatcaagctgactcccagctatttcctttccacagcggcccaggaggggctattrgctctgcagagtgagctgctcaggatcacgctgcctgacttcaccggggacttraggatcccccacgtcggccgtgggcgctatgagttccacaggtggggctctcccttctgctgcggctctgaagtggctggagctggctgtcagggggaattggagagtgaggaagagagagcctcaggattgggctgtggggggacctctccggggcrgacagtgggatagttccctgaagagctcagaaggaaattctgggaaggaattgagctcctccactcagtcacgcagcaaatattaaggaagacctactggctgtgtgatctgagccttgatttccttatctgtaaaatggagttgatctacttcctccttcagagtgctcatccaagatccaatctggccactagatatagtttggaagagaagatagaccttacactttaaatgtagtagcccaacggttagagctgaagtttgtacttgggggagtcagggaaggcttccaggagaaggtggcatttgagccaagtcttcaaaagwttactagacttgagcagctgatgctttaaaagagcgtgaactgctttttgagggatgggcagtgaagaaacgacaatcagactcgtagcacattgtacccctccctgctcactgctgttgggcgtttccttcattcctgccttcttttattcagtccatcagcaaaaatctattgggcacctactatgtgcccggcaaataaaatagaacttgaccgttcttttcccactgtgacaaccttgctgacttttttggggtcttatcttaaggctgccaccatcttccctgaatctgtttcccccctacctggatgtattgagagagaggagggttagcaggaactgcaaacccaaagggatatgtctacggaccttctcaggatgccaccgggggtcattagattcatgggttctgatgcagactgcaaaaccgtgagcaattgcatcccttcctcaaggttctatttccccctttgtggaaagggagcaagaacactgctgaccccttcagtgtggcccatatggcatgaagaaagtaacgtgcttagcatggtcataagatcgatgcctggggcacagcaggtgcttacctggagcagatcctgctggtctagtccccactgkggagaggggaggcgcaaggtccctggtgaggctgggtccaggcccagggctgacacctccttccatgtctctcccttcagcctgaacatccacagctgtgagctgcttcactctgcgctgaggcctgtcccyggccagggcctgagtctcagcatctccgactcctccatcyrggtccagggcaggtggaaggtgcgcaagtcattcttgtaagttggctctgctcccaggccctgragctcttggccttggccttcgccccatccttcttaggtccaaggtgttcctagcttatcagaaaggccacgtgatggacagatggagtccaagcccggaggtggcctggggattgagtcctggctcttggatgagtgtctttctgtctctgagtctctacttcctcatctcccaaaggggacgggcctgcttccttgatggagtcatgggagggctaagtgcggtaatatcatgtctccttggtttgcttcccacagaagcagactttagggcaagaattccagtgcaatactttatcttggaagcgatctgaggaaacccacaggggagtggggaagtgaggaagggaagggaagggaaggaagtcagcctggtgggcaagtgaagctctgtctagctggggaactcagggacagyggagaacacgcctctgagttactccagccccacgctgtcaccccrtcctcctgcttgccattggccaagggctgcttccaggggctctggctctcaggcactttgaacagttctctgacctcagaggcacttggatggaaggggtattcatgtgctagggctgccataacaagcatagactgggtggcttaagcagaaatgtgttttctcacagttctggaggctgagggccaaggtcaaggttttggcaggcctggtttcttctgaggccactctctttggcttgcagatggctgccctttggcaatktcctcacgtggtctttcctctgtgctcaagaaatcccatttctgaggccatgcacgttggctcacccctgtaatcccagcactttgggaggctgaggcgggaagatcacttgaggtcaggagttcaagaccagcctggccaacatggcaaaaatcagtctctactaaaaatgaaaaataaattaaaaatttaaaaattagccaggtgtggtggcaggtacctgtaatctcaactactcaggaggctagacagaagaatcgtttgaaccctggaggcagaggttgcacagagctgagatcatgccactgtactccagcctgggggacagagcgagactccatctctaaaaaaaaaaaaaaagaaaaaagaaaggaaagaaaccccgtttctctctgtatgtcctaatctctttttataaagacactagtcacattggattagggcccaccctaatggcctcatttaaatgtaatcacctcttcaaagggcctatctccaatactgtgacattctcaggtactggggatcagagcttcaacatctgaatttgggaggcaggtggtgacacagagcagcccatagcagaaggaacagcccaaatatgggtgatatgaccatatttatacttcagacctgcactgcctaaaatagaagccaccagccatgcctttactgagtacttgaaaagtgcctggtacaagttgagatctactctaagtatgcaacactggatttgaagatttaggattaaaaaacaaacaaacaaacaaaaaaacagcagctgagcacggtggctcatgcctgtaatcccagcactttgggaggctgaggcaggtggatcatttgaggtcaggagttcaagaccagcttggtcaacatggtgaaaccccatctctactaaaaatacaaaaattagctgggcgtagtggcgcatgcctgtaatctcagctacttaggaggatgagacaggagaaycgctgtagcctgggaggcggaggttgcggtgagccaagatcacgccactgcactccagtctgggcaagagagtgagaccctatctcaaaataattaattmattagttaattaaataaaataaattagccaccacacctggctaatttttaaaattatttattataaataaataaawctcattaatattttttatattgattacatgttgaaatcatactatgtattactaaaattaatttcagctctttctttttatctttttaatgtatcttctggaaaatttaaaattacatgtgtggctctcattctattgctttagaaagacggctggtttatatgttacctacatatgcacatttgttctagttccatgaaaggaactggccacactctcttaccctggcttttgtcactgaagtatcttaaatatctctttctatgggcatatgactatctacctcattttttttcacttttttgaatgtgcttttaaaaattgataggaaattcacggaacataaaattgattatttgaaagtatacattcagtggcatgtagtacattcacaattttgtgccatgtccacccctatctgactccaaaacattttcatcatcccaagagaaaattccttacccattaaacaatcattccccatttcccttcccccagctccagacaaccaccactggggttggagactcctggaatagaccacattttgccccattgttctcaaaggctgcataacattgggtgcccacagcttattcaacctgtcgctgctagcggacatgtaggctgcttcctttttttttttttttttttttttttgctactgcctatgatgcttcagtgagctgccccacaccacgcgtatatcttggcaggaagagctacgggataaaggcttagaagttaaattactgggccaaagagtatgtrtgttagaacgaggagagatctcactgatttgtgtttcagaaagcttgtgccaatgtgcactctcccagccacagtgtctgggacttctgtttactcgtacattcaatagcattgagtactaaaacttcaaaagttttttttgaatctgataggcgagaactggtgtcattgttattttcatttttaatgacttttacatgcttattttgtactgcatttcctgttcatatctttttttttcttttgagttgttctttctttccttgttaatttatattggcttgttctttgtatattagggaaataagcycatatattaaggaaattggctctttagatgtctcatactgcaattttttttttactttacatatggcattttttttgtccactgaagttttaattttctatgccgacaagtttatcaaggatttcctttatggcttatgagacttggatattgcctagaaaggccttcatccagccctgcctggaaatactggatctgggctttcttctagatcttttatggctttatttgttattcttaaatctctgctcagctccatgtatttggaggtcagaactgagccttctattttccccacaaatggtggcagacccctggtctaggaactaaccatggcttctcttacctcctccagcaaamtacagggctcctttgatgtcagtgtcaagggcatcagcatttcggtcaacctcctgttgggcagcragtcctccgggaggcccacrgttactgcctscagctgcagcagtgacatcgctgacrtggaggtggacatgtcgggagacttggggtaggtctccatcggggcactgccagcyggactcctggttgcagctccyggccaatccagcgctcagcctggcctccgataattgcaatgatccaggtggcttgcacaggcacttgaagatcattctctggggaaccctgttragatgaacagacttaagccaggaatattggtgcatcattttcattaaaaaaataaactttcattcacctgacaaggggacccttgtcaggtgaatgaaatctggctatttggaggaacacagaaactttggttgaaggagagtttgcgaaaaacatacaagtccttggacaagtcatttcatctcttctagtctcagtttccttgattagaaaagtgtgaccgggtgtggtggctcacgcctgtaatcctaacaatttgagacgccaaggcagaaaatcgcttgagctcaggagttcaagaccagcctgggcaacgtggtaaaacctgtctccacaaaaaaatacaaaaattagccaggcatgatggcacatgcctgtagtctcagctacttcaggggctgagttgggaggatggcttcaggccaggcgacagaggttgcagtgagctgagattgtgccactgcactccagcctgggtgacaaggtgagatcctgtcccccacccccccgcaaaagaaaagaaaaatgtggattctcaagccgcttccccaaatctgctgaatgtgatcatgcgattgggtgccgcaggcactgggaagccagacacaccgaatcaggctggatgtgctgggacacagcagggcgccrggaaggggtggagagggctccctttgtggactggcmtgascagggaccagggcctggctttcccaggcacccggccatccccaagttcagtggcagactgtgcttctctccccaggtggctgttkaacctcttccacaaccagattgagtccaagttccagaaagtactggagagcagggtaagaaggtccaagcctctggcctcccccgagcttggcrarggctgaatggaagacctcactgaccaatggccctggaccaggccatgggggctggtttagacgtacttgggcccaaagcccagggaggacaaatcatttgcccaggtcatggagctgttgtggggcaygctggggacaaagctccaagtccgttcggttgggcagaaaatggtcaactgcttgaccaagggttaaacagcaggggctaaacagagactccagcccctccctctgctccaccttgctcagtgccccacactgccytgcattccaccaaggtccgaaaggaaaccattcctcaggcgcctgcaagagaccaggcaggaaagctcagcgagggcgtgggccaggtgggaactgggcgagctcatgagcaccagccctggatggggaggcagcaacactgtcagactggcctgttaaaaaggagtatgtgaaatcttcagagtgtatcatctttgactaaatcaaaaagatgtcgtgttaactttcagttcctctaaacactcattcatcccaaaatcccgtttctgagatattagccaaatggtatctgtagcaatgactgtgggaagggagaaagtgatggaggaggaaagggaaaaaaacacacacacaaacacacacacaccacaccccacacacactccctcccagcacacacacaccacacacacatcctacacacaagcaccccccacacaccacacacacacaccctccacacacacacccacacacatcccacacacacacacaccccacacacaccctccacacacacccccacacacatcccacacacacaccccccacacacaccctccacacacacctaacacaccacacacatacacagcacacacatcaaccccctcacacacaacccacacaccctgcatcccccccacattcacccctcacacaccacacctcccccatacaccctccacacacacccccacgcacataccacaccccacacaaacacaccccacacacataccataccccacacaaacacacacaccccacacacacaccctacacacagacagcacccacacacaccacacgcaccccctacacacacaccacacacaccctacacacacaaaacacaccacccacagaccacccacaccccctacatgcacacaccacacacaccctccacacacacacaaacacaccacccactcacaccccccacaccacacacacgcgcacacacacacacacacacacacacacacaccctcgtctgtaggtccaacctctggtttggctttgagtgccccctcgtggttgaaacaggaacagcaggcaaaccccgcattttgggtgtggccagctgtgctctttcttttctggttctgggtccctgggattaagtgaccctgagaaatatgccaatctactcaggcaccctgttgccatattgctgtgcataacaatagtaatgtagcacaattataattatcacagtaatcacataccataattattgttttgataaatgtatataattaatgctgtacagaatatattattgtataactattctgatttataacaaaaatggctgctatttcttgagcctgtagcttggccagggataatgggctcagcagttcacgtgcacagtccctctggatctctctttttttttaattgagacagagtctcactctgtcgcccaggctggagtgcagtggcgcgaccttggctcactgcaacctccacctcccaggttcaagcaattcttctgcctcagcctcccgagtatatgagaccacaggcacgtgccaccatgcccagttaattttttgtatttttagtagagacggggtttcaccatattggccaggctggtcttgaactcctgacctcatgatctgctcacctcagtgtcccaaagtgctgagattacaggcgtaagccaccacacccagccagtcccattggatcttaacctcgaccttggaaggaggtgccattttccacatggacagaggaggctgaggggtggaktagctttcccagtgtcaccttgctggtgagaggctgaatcaggattggagcttcctagaatgtggagcagcttgtaccaaagcccttctagggctaggtgtcttgggaaagatggagatctcacctgacccctgatccttagagatcttcgaattatcttccagaaaaactaagagcctgacgcaggcctttctaattccccactcagggtgggatgtggtacctggaccagcaaggctaaggagaagaataagcactcacgaatgcttgctctctgggcgatatatactcactatctctatccccaacttcccaaaatattaccagaaaggggtcctgatccagaacctcaagagagtgttcttggatctcacgcaagaaagaatttggggtgagttcataaagtgaaagcaagtttattagagaagtaatgacggaaaagaatggctactccacaggctaagcagcaacatgggctgctcagtcgcgtatacttgtggttatttcttgagtctgtgctaaaggggtggattattcatgagttttcctggaaaggggcgaggacttcccagaactgagggttccttccccttttagaccatatagggtaacttggaaattgccatggcatttgtaaactgtcttggcactggtggtcatgtcttttagcatgccaatgtattataattaacatataatgagcagtgaggatgaccagagggcactctcatcgccatcttggttttgattggtttggccagcttctttaccgcatcctgttttatcagcagggtctttatgacctgtatcttgtgataccagtcctgctgacctcctagctcatctggtgactaagaatgcctaacctcctgggaacgcagcccagcaggtctcagcctcattttgcccctgttctagatgaagtcactctagttataacaccactgacaaaaacaccctgggaagcacttggccttgccattgtatcttgtgagtgagaaccaaaaagcagagagaggttctgcaaaggtcaaacagccattggggactgggcaggatttgaatccaaatttacctggctttcctgctgcacccctaaccactaccccagtcgcatcctcaggaggccctgctgtgtgtctgcaactcaggcatcccatgcctcccctgcccagtccttcgggtccctaaagactggggcatccaggctccaggcttttgggatggtctgatgggctactgtctgaaggaaaggcaagaaaggagcggtcttcagggagatggatggagtttcttggttcccttgcaatcaaccacgaatgttcctcaccacacttgaccttgctttctggcagctcatcgctgctaaactcctctcccagaaaatggagcagctgcaaagagaggttaagatacagccctttgccctcccagcccccagcgtcacccttccatcagcaacccagcgtctgatggatggtgcctgcttacccttcagcacagaagccatctgtgacccctgcactaggccagggctctgcatgtccctctccttcactgtacatgtggattcattgcacaagaggtggtagctggctaacaaaaagagctgtttaaagtgaggactttctcatcgcacatcaacaaagaaaatattgacgtatgaacccaaatgttttaatggtggagtttcaggcagcgtctccagtgccccctcttcgagctgtgtcagtgaaggcccacagctattctttgaaaatggtctcttgattgacattgcccttggtctttcctgcataaaacattaaactgctacaaattccatcccaggtttctttaactgcaatgagaatttaaagacatttgcaaagccatcccagtgtagaatccttcttgatctttatgattttttttcctcctaagattttctgttgtctgttccaaatttaatcttgcttttagaggggtttttttgtttttcgtttttttggttttttggttttttttgcacctcacctttccagagtatttatcttaggttttcrtagaaagaacccttatagctggggccgggcatggtggctcatgcctgtaatcccagcactttgggaggccgatgggggtggaccatttgaggtcagaagttctagaccagcttagccaacatggtgagaccccagtctctactaaaattacaaaaattagcagggtgtggtggcacatgcctgtaatcccagctacttaggaagctgaggtaggagagtcacttgaacctgggaggcagaagttgcagtgagctgagattgtgccattgcactctagcctagataacagagcaagactgtgtctcaaaaaacaaacaacaacaaaaaaaaaaactcttttctcaatgatattgcattagtgtacataataaataattcgagtaattacaaaagcaagtacagcaaacaggtggtaggctttcatgtggactccagtagggcccagttggacttttcaaagtctatcccaaggctgcatcataaataattcgggtgattacagtggcaagtacagccaacaagtttggaaatgcacatttccttctcttgagaagcaggccgcacaactggtggcaattgtgtgtgagtagcctacagaccccagcattcagtcttccaggagtaccagcaggaatggggaatactgatcagtccagccaatctgttcaggatgaccattaagaactatctacaggccgaatgtggtggctcacgtctgtaatcccagcactttgggaggccaaggcaggtggatcgcctgaggtcaggagttcaagaccagcctggccaacatggtgaaaccccgtctccactaaatatataacaattagctgggcgtggtggcacatgcctgtgatcccagctacttgggaggctgaggcaggagaatcgcttgaacccaggaggcagaggttcacccaggagggtgagccgagatcgcaacactgcactccagcctggccaacagggcgagactccatctcaaaaaaaaaaaaaacaaaaaaactatctacattaactgtatgtttatttgtgtttatttctagttagtgtctagttctgctattaaactctaaattctgagaggccaggacctcccaaaggaaaactttgtaatggtggagtttcaggcactgtctccagccagtgccccctcctcaggctatgtcagtgactccctagctcaggtgtccagccctgggacagactgaaaagtccaactggaccctagtggagtccacatgggkgcccacatagttttattgtttgtatttccttggtacctggctcatgacaagcacttataaatatttgtaaatcagtgatcactgagcacaygtgtggaataatgtgactgcagtgatcagcacsgggccagaccagagctggggaactcactcagkyattctcttcccatgtttttcagatttgcgaaatgatccagaaatcrgtgtcctccratctacagccttatctccaaactctgccaggtaggacaccccatccatcccgggacacttttatttctgttaatttctataagagcatatatatatcttataaaatagtaaatggggcaaaaatatagaaartaaaaattaagggccaggcgcagcggctcacacctgtaatctcagcagtctgggaggccgaggcgggtggatcacctgaggtcaggagttcgagaccagcctggccaacatggtgaaaccctgtctctactaaaaatacagaattagccgggcgtggtggcgcatgcctgtaatcccagctactcgggaggctgaggcaggagaattgattgaacccagaaggtggaggttgcagtgagccaagatcacgccattgcaccctaccctgggcaacaaagaccgaaactctgtctcaacagaaaaaaaaaaaaaaagaaagtaaaaattaaaagttcatttttctcccccacttttcttccaagaagtaacttctgttttgggtgtatcttttcagatattttctttgtatgtacaaatataaatacatgtaagcatataaatagacattcatgtatgtattattttgttcatgaatctatgtgtatatgtattattttaaatatatatgttcatatacatatagtataggcattgttccagatttcttttttttgagatggggtctcactctgtgtcccaggctggagtgcagtggtgtgatctcggctcactgcagcctcaaactcttgagctcaagtgatcctcctgcctcagccacctgagtagctgggactacaggtgcatgccaccacacccggctactttttgtattttttgtagagacagggtttctttatgttgcccaggctggtctcgaactcctgggctcaagtgatctgcccacctcagcctcccaaagtactgggatgacaggcacgagccactgtgccagcttgatttcatttttaaaaactttttattgaagtatatttataaagaaaagtgctcaaatcataagtgtgctgttaaagagtttttacatgcatgtaaccagctcccaaccgagaaacagaacacggctggtttttcagagcccctggtgtccccctcggtcactgcccagccctccagggtcaccaccatcccaacttctaccagcaaagattagttttgcactttgcacatgaatggaatcagacaatattttgagtctcttttcaaaagccagaaggctttctttgttcaactttaaaatatgaggtcagggctgggcgcggtggctcacgcctttattttttgttttctttttttttttttttttttttgkgagacggagtctcgctctgttgcccaggctggagtgcagtggcgcaatctcggctcactgcaagcttcgcctcgcgatttcacgccattctcctgtctcagcctcgcgagtagctgggactacaggcgcccgccaccacgtctggctaattttttttgtatttttagtagagacggggtttcaccatgttagccaggatggtcttgatctcctgacctcgtgatccgcccgctcggcctcccaaagtgctgggattgcaggcgtgagagctcacgcctgtaatcccaacatttwgggaggccgaggcgggtggattacctgaggtcaggagttcgagaccagcccagtcaacatggtgaaaccccgtctctactaaaaatacaaaaattagccaggtgccgtggtggatgcctgtaatcccagctactcgggaggctgaggcaggagaatcacttgaacctgggaggcggagtttgcggtgagttgagattgtgctactgcactccagcctgggcaacagaacaagactctgtctcaacaaagaaaaaaaataataaataataaataaacaaaataaaatatgaggtcaggtcaggcttggtggtgcacacctataatcccagcactttgggaggccaaggagggagtatcacttcagttcaggagttcaaggccagcccgggcaacatagcgaaaccccatctctacaataaatacaaaaattagccaggcatagtggtgtgtgcctgtagtcccagctacttgggaggccaaggtgggaggatcgcttgagcccaggaggtcaaggcagcggtgggctgaaattgtgccactgcactccagcctrggccacagagtgagatcctatctcaaaaagaaatgaaataaaataaaacatgaggtccatgcatattgttgcatgcacctgtagtgtagctggtttattctccttgctgcatagtatatcaccatgtagatgtttccccatttatttgttcattctactgttgaaggccatctggggggtgttcagttttaggccattatccgtagtgctgctataaatgtcctagtacctatggtcgcatgtctttgggtatatatctgggagtgaaattgcaagctcgtcatatcatgtgatatgcccagattcagcattataagatcctgccaaacagttttccaaagtggttgtaacagaccttatttgttaacagccgtgtagtgttccatcacatggatgtgtcttcatttatttaataagtcccccactgatggacatttaggtgctttgctgtcccttgctattgccaacagggctgcaaggagccatctacaagtggagtctctggatccagggtgcacacattaagctcggagggggagaccctggcaaattatctgagatgttctctgatgccttakctcctaagcccctatgcggttatttgctgacatcacctttaccagaggtccaggtcggcaacccggtactgggacttggaacattcatccattcagggttttggaggggagtgtctgggccctctggacatgccatgcctgaccttcctggttattggctcagcattaagctccaggtgtggctggagaggtgaagcctggactcatggtgtgtgtgtatgtgtgtgtgtgtgtgygcttgtctggaaactgcttaggccctaggctgagcatacacccccaccattgttaactcatccaagggaatccatgtagtstctttcttgaagaagcaattctttgcctcagggccgggctagtagggggattctgaagaaagtcacagggaatgtgartcagccagagcccttgcccctcctccagcagctgaaagtgtcatctggcccctaattctgccctgtcctcattcacagttacaacagagattgacagtttcgccgacattgattatagcttagtggaagcccctcgggcaacagcccagatrctggaggtgatgtttaaggtgagggtcctggggccgggctgcgtgggtgaggctttccctcagggtcagccattctttgggccacctgtccccccaacttcagatctrtcctcatcctcccagtggttcccgctttgtcaagggccgggtgatatggagtggtggggagtgtttccagagctaggattctcccacggctgtcttacacctctcaggtcttaacgcttccctcctccttcttcccctactttgccttgcccatcatgcagaaaaggccaatcagagcgggtcttagggagtgtagatgggcctagggcatatagaggggctggccaggacttcctrtgggttaatgtagcaaagcttctggtgagcttttcattaaaagacataacactgcctttaatggtggagtttcaggcagtgttccagccagcgtcccttcatcggactgygkaggggaatacctagcccctsccccacgataggctttgaaaagtccarttggaccctatttccctctccagggtgaaatctttcatcgtaaccaccgttctccagttaccctccttgctgcagtcatgagccttcctgaggaacacaacaaaatggtctactttgccatctcggrttatgtcttcaacacggccagcctggtttatcrtgaggaaggatatctgaacttctccatcacagatgacatggtgaggatggtggcaaacaggtctctcaaatgaacacataacctaccgctccttccttctttccttttcacccctgttgacatcagtcaaatagtgagttatagctaagagaaaaatcaacaccaagaaaaatatgttagcacaatctccctttttactttggcaaccaagaaactcaaagccaaagttctttctcccatggctgggtgtggtggctcacgcctgtaatctcagcactttgggagcctgaggcgggcggatcacttgaggtcaggagcttgagaccagcctggccaacatggcaaaaacctgtctccactaaaaatacaaaaattagccaggtgtggtggtgtgcgcctgtaatcccagctacttgggaggctgaggtgggagaatcgcttgaacccaggaggtggaggttgcagtgagccaagatcatgccactgcactccagtctgagcaacagagtgagaccctgtctcaaaaaaaaaaaaaaaaaaagctcttcctcccttataacaactgtggaagactttgcagcttacttatctgtgttttgcttttctagacctgtttactagtctagacttgttagtctaattcatattttctctcatcctgatgatttctggaggtttattaaaaaatattttagtgaatgaggccgggcaaggtggctcatgcctgtaatcctcgcactttgggaagccaaggtgggyggatcacctgaggtcacgagttcaagaccagcctggtcaacatggcaaaacctcatctctactaaaaatacaaaaattagctgggcatggtggcacatgcctgtagttccagctacatgggaggctgaggcaggagaattgcttgagcccaggaggcagaggttgcagtgagctgtgatctcrctacttcactgcagcctgggcaacagagtgagactgcatctcaaaaaaaaaaaaaaaaatatatatatatatatatatatatatttatatgtgaatgaggcaagataatacatgcactgataaatgcatatattttcagagaaaaggaaataaagaccaagtgaaaataaagcacaattataaagacactgagcccttaaattaatttctttaacatctcaaacctgtcggggagcttccttgtagctaaagtgaaaaagatacatgatttcatgattcatggtgaaaaggagagacagtcttcctcacacccccaaaacaactgtttccaatgtggctttgtataagggagactgaattttayagtggatctcacctttaatggttctccagtttatctaatatttctgggtttcaaaaagttgtttcttgaagcacttcataaaagttgaggcctcatgaataatgtcaggatggtgggagaaacagtgtggttcggctcagacggtccagcttaccctggtataagtcaggggccgtctggtagatcgagggtcattttgtccttctgatggcctcctacacctgcacaggccttcgcttctggcatcgtgtttggtttacccatcctactgcggcacgggcctctctttcaatgggatgataatagctacgttttatggagcactcaccatgtgctgggccttgtgctaggatgttcgtttaggcctcacagtgactcgraggtggggactattgttatccccattttatggataaggaagttgaggttcagggagatggaagggctggcctgagatcacaaagtcaggacacaaaccgaagtctgtgtgaccgcaaacctcaccctcgcagaccctctgagtgggagccacacatcagctgccccccggggagagcrggcaggatgctgaagtcccmtgtgctctccttgggtgaatgcaggacaggcatctcctccctgccagggtaacccaggctgtggagaagcgacagtcttgcacatccccctgyctccccaatcttctttagaccttcagctccagcrggagcaccctaaaacttcttcrtgtctctttgctgcagataccgcctgactctaatatccgactgaccaccaagtccttccgacccttcgtcccacrggtaaggagtcccttagttccccatgwgtgcagaccgagcctactagactccagaggtttctctttaaaacctctgcatctctcagcttgaccaagagtgagaaggccgggatgagactcccactgaaggctggggtgctgctccyttcaaagcctaaataacagaggccacgccccatatcttgtgggaccrcagcttgtccaatcttttattggtgttatctaagaatcccaaggaatgctggcatagtccataaaatgtaccctaatgaacagcagctaacaattacagggggcttcctaggtgccaggcatgttcttggttctttaaaaaattattttttggccaggcatggtggctcatgcctgtaatcccagcattgtgggtggccaaggtgggtggattgcttgagtccaggagttcaagaccagcctgggcaacatgaygaaaccccatctctacaaaaaatacaaaaattagccaagcgtagcggcacatagctgtagtcccagccactggggaggctgaggtgggaagatcacctgaggctgcgaggttgaggctgcagtgagctgtgattgcaccactgcactccagcctgggcaacagagtgagaccctgtctcaaaaaaaattattaaaaatgttagtttttgaatgggaaataaattctcaaggttcaacattcaaaagatctagaaggttatagagtggaaagtctcacatccactcctattccctaaccacccagttcccatctcaagtttgccaatattaccagattttacatatctttctgatgatattctatgtatatacaggttcactatctcttatctgaaatgcttggaaaagcaactctgcctaccttcttagtgaagcattttaccccctcagccttccaaatgtctcccttctagaagaggatgtaggttttacatatacataaccaaaaggttcatgggagtgctgtttttccacgaatagcctcctaaaaaggaagagtcttgccccaaattaaactctgtacctatctctagtacacagaaaattaagagcacttttgaaatggtggaatctagggctggtcgtgktggctcacacctataatcctagcactctgggaggccaaagtgggggggtagcttgaggccaggagttcaagaccaacctggacaacatagcaaaaccctgtctctattttagaaagaaaagttaaaaaagaaagaaagaaagaaagaaatgttctgtggaatatcatattaaaagagtaatacgagaaaattaaatattttttttaaaaaagaaatggtgggatccagctgtgtcatatttcgaaaacactggcatctgacctcagcatgcccaattagcagaatgtgatgaggggatggagaaaccttgggagaggtagggagggagaaaaaatgggcccaacttttctggaggacaatttggcaatacctgccgaaagttttaaaagcattgctggccaggtgcggtggctcacacccgtaatcccagcactttgggaggctgaggcgggcagatcacctgaggtcaggagttcaagaccagcctggccaacatggtgaaaccccatctctactaaaaatacaaaattagccgggtgtggtggtgcacacctgtaatcccagctacttgggaggctgcagaaggagaatcgcttgaaccccagaggcagaggttgcagtgagctgagatggcaccattgcactccagcctgggtgacaagagcaaaactccatctcaaaaaacaaaacaaaaaaagaaagcattgctgtccttcaacccagcaactccacctctaggaatgttttcctgaaaagaatagccaagggtgctcacaggaggtgktcattataatggcaaaaccctggagacaacttgatgcccaatagagtttaatccatcgcaggacccatacataacgaaatacaacacagccgtgaaatagatggtgcagactctgtgtctgacatggagagatggccagttttgccactaggagaaaaaggcacagagaattttgttggaaataaaatcaatcgaaagcaacttccagctttatctgactccctcaggcctctcctggcagacttgtatattttcttctcttgatgtaatctcctaattctgytcccagttagccaggctctaccycaacatgaacctggaactccagggatcagtgccctctgctccgctcctgaacttcagccctgggaatctgtctgtggacccstatatggagayagatgcctttgtgctcctgcccagctccagcaaggagcctgtcttccggctcagtgtggtaaggttcagagcctttgcaaatgctgtttccttttccccacatgcttttcccttttccccacatgcttttctccccactcaccacctgggtaattcctccaggtctcaacttaaatattacttcccgagagagggctttcttgctggcccttacccccaatctaccttacgccccttgccactttttcttgtaacaccccattatctttcttctcagcgtttactacaaagatactttgtagctgtctgcaggtgtatttgtttaatgcatgwatctctcactatgtgagtctgggctattgtggggagaaaggtatactggtgtttgtctatttgtctattttgaccttggaagactacatttcccaagcttctttgcactttgatttccacccaggtcaaccaatgggaggtactgtcaggagaatgatggcggggaggaaggatgaagccagagtactatttcctctttctttrccacggcagaggctctggctgtgacwatgtctcctcatggtgacttccataattccacctccactctttgttcctctagtcctggggtggatacagcctcctgtctctggataatctctgggtggcctcaccaactctttactagcttctcaacaattccatcacttgtataaccaattccccgtattaaattccctctgcgttaaacaytgagagtcagttttccttttttgatggactctgtctaatagggaagggatgttgggtcctttgggggccttgctccctggatggagaactctgctctcttgtttcttgacttttgaaatcaacaagtcaaatctctaccagggtaattcttcctagaggctatatctgcaatttaatattgttgttattgttatcaaaagtgtcattattaatatattttaaattaaaatataatttactgtctgggtgtggtggctcacatctgtaatctcagcactttgggaggtcaaggcaggagaatcacacaaggccaggagtttgagagcagcctgggcaacacagcaagactccattgctacaaaaaagaaaaaacaaatagccaggcctggtggcatgcacctgtagtcctatctactcagggggttgatgtgggaggatcgcttgagcccaggagattgaggctgcagtgagccatgattgcaccactgcactccagctgggcgacagacagagactccatctctaaaacaataataataatttattawtgttgttactagggctgaatcttgacctgagataactagaaatgatcctttttagagctttccaagggtaggtactctataccttctcttagtagtctgttcaaagtttaactgctaacataaacaacaatttcaagtaaaaatgttcaagtccaagttcaaatattgtttgagcacctacagtgagccttctgggagtctatgatctagtgggcaaatttcctgctttagctcattgagctgtttgttgagaggagacagttggtccctcgtcatcatccttcctatacatacaaccttcatcacttacacctgcttccttcttctggcatttccaggccactaatgtgtccgccaccttgaccttcaataccagcaagatcactgggttcctgaagccaggaaagtaagttggcctcctacctacatgggggtgcccagctggactccatctgtatgctgtagctgcttctctgtagctggtgggagggggggccaccatttggaaaggacacttacatttcaccccaattggcccaattcttctgccccactggtcctgcccccacaaatctcaaattgttaaagaattcactaagactgttacttcttaatgtatgaattttagamgccagctatatgaacttcctgaaatgataaagagtgagctttttgacactatctcatctgccctgtgacagtcttcccgatgtcattgtatcactgcttttagttcctcagtcatcttttccactcctgctcccgccctacctttggccctgtgccttctcaagcccatcctttctcgcttctggggacccccgcattgcttaaacttgcataaagcccacacyttttaatcttctctgattcattacagggtaaaagtggaactgaaagaatccaaagttggactattcaatgtaagttgtttttattgatgacatgattagaatgttaattaatttggggtgtttcctaagcaattgctatggcacctataataggaaatacaaaaggagaagagttgattttttgccctgcagaagtgtaaaaggtctcgaaaacacaagacatagggccaaggaacagttatatcctagtataaaacaatatataattaagtcatctactgaacagaattctcttaactgcaagagacagaaagccaattgaaatcatcttaagcaaagaggagaaatatataggattatataattgaaaagcaaaaataaacgaaaaaactaagaccagaggtttcaggcatagctggatccaggtgttctaattagtgcatcaagaatctctctccatctctctgttctgttttcatttgtgttagcttcactctcaggcaggctcttccaattggtagcaagccccagagtttcctacagtttcagttttttaaaaaatttgcacacacacacacaaaatctctgtgctagctctcattggactaatcttaggcacccagtcttaagccaagcactgtggccagaagtcagcccagcatggatctcatctacactccaggaggcaggatttgcagtcagctacatccaaagcacatggaccaagactggcaaggagggttgttccctgggggaaaatagactccgttatcaaaacaagagggattgagtgctgagcaggtaaatccaagaagtgatttccacaaggtagaaaaagtggtgaagtagacggccccaaataaaaggaggaaagagaacgtgaaaatcagtgtgggccaaagttatggagaagagctttctggaaagagggaaggaggagctgggtagactttaatgtgtagtcgttggcttctcttttaccattccatgatgctggcctccactgaccacctccacctgtgccctgcctcccagactttcccgaagcacttatgaagtggaaacaaacacagaggcggtggggagagatgcagggaccctgaagctaactcctttcagagaataaagggtggagtgaataatggtgcactcatattgtatctgtgcgtgtttactgcaaagtaaaacattcaagtgagaagtttcacaaaaatccatcctgtcgggttttcagagcatgaaatgtaaaaacaaaaactacagactcagatacatttagattcgaatcctgatgctgctgcccagtttgtagtaagtccctttcattctgtaggcctcagtttcccgatatatggaatagggacattaatatgaactttgaggggttgttgtgaagattgaatcagacatgcacgtaaagctctgagctctctgcttggcatatagtgggggttagaagttgtgtttcatgattttggtagagaagcttattttgtttttattaaatttttwaaattatgtaggtagttcargaaaaacattctcactgtaaataaaaccgatactaaagataaggctaaggacatgtcaaatgttgatgttcttcctttagaggaaagactgtcgggtgtgtaactttccaaaatttttctattcacttgcataccaaatgttcatctcaaaagagttttatcttataaaatagtagcatgatgtaatactagtttgcttttyccaagcgttttgctatgttggcacacacagaaccaccatgtggccctgtggcgatgtaaatatatctctcctgttctcttccaggcagagctgttggaagcgctcctcaactattacatccttaacaccytctaccccaagttcaatggtaagaatcactgtggatttttccaagtcaaaagtgaacactgctgtctggaggaaagagagttggacttggaaaacagggctctcctgggggctgtatgaccgtgggcaagtcacttctctctgagcttagtgacctgcctgtgacatgggatygttgaagttggcctcatctcccyccagggctctaatgagggttgggggctgggacagctctttggagcacgggaaacctccttataagcgggacagagggacacatggaagtgccccacatcctgaagaggcaggtcaaagactgaggaccaagttaatatagaaggcacaaggcagccgcctctgaactcacatctcccagtcaattgcccaactgcctagtcaaaaaagaaagcaaaaaacttaaatcctgtttccatgaagctttgcttcttttggctgcaacagagaacaggacgggcaaagggcagggagtggaacgccctgttctttatcttatcatgaatgtgtgcttcctccagacagcaccatgcctgatagcttaggctcccaagtcagcctccctgggtttaaatcccctttctgacacttcctgtgtgacctagaayaagttacttggccactctgtgcctcagtttccttatctgtaaaatggaaagaataatcacacctacctcatagtcttggaaatcactaaatgggaatatactgaatatagagtttgcagagaacattttcggtaaaaatctgtctctaattattatttattcaccaatctctttcaatgttgtgcttcaacctcyagataagttgrcygaaggcttcccccttcctctgctgaagcgtgttcagctctacgaccttgggctgcagatccataaggtcggtgggttcaggggggctctgaggatgtgtgagggaggaggtggtttgcatgctagctttggggccatgattcatgggtgacacccagcccagccctgcagctgggaaagtctggccaggggcaggacgggtgctcctgggccttgccatatgccacaaagccatccacatgtccttcagaagtggcacctctgctggtgcaggtggcatttgacacagccctatgccaccaccacatcccatccctaccatgaggggcytgagggaagctcaagaccagctcgttttgaaaatactgcgggccgggtgcagtggctcaygcctgtaatcccagcactttgggaggctggggcgggcagatcacgaggtcaggagtttgagaccagcctggccaacatggtgaaaccccatctctattaaaaatacaaaaattagctggacatggtggcaggtgcctgtaatcccagctactcaggaggctgaggcaggagaattgcttgaatccaggaggtgaaggttgcagtgagccgagatcacgccactgcactccagcctgggcaacagagcaacactccgtcaaaaaaaaaaaaaagaaagaaaaaaaaaagaaagaaaatactgtaagtcctagacgtagcattaggtcaggttctgaaagtcatttgtaagttttaagcttttcttctaaattttaaggttgaagagctttattataaatacctgtttggcatgcctccccatttaaacaagtactacaaccatatatacttttttttttttttttttgagacagagcctggctctgtcacccaggctggagtgcagtggtgcgatcttggcttactgcaacctctgcctcccaggttcaagagattcttgagcctgagcctctggagtggctggaactacaggctcccgccaccactcccagctaattttttttttttttttgtatttttggtagagacaaggtttcacaatgctggccaggctggtctcaaactcctggcctcaagtgatatgctcacctcagcctcccaaagtgctgggattacaggcatgagacaccatatacagccaacactatatatgtttacaaaaattattcataaacctattgctccactacaagcacagtttgaattttggtgtacttctagtgctttttgttttaagggtttttttttttaagtttgtttgttttgcacagttgcattactagtgctcatacctgttttctttctttccctttttttttaaaacttaaaacaaatttttttttaggccaggagcggtggttcatgcctgtaaccccagcactttgggaggccaaggcgggcagatcatgaggtcaaaagtttgagaccagcctggccracatggtgaaaccccatctctactaaaaatacaaaaattagctgggcatggtggtgcgcacctgtaaycccagctactyaggaggctgaggcaggagaatggcttgaacacgggaggcagaggttgcagtgagctgagatcatgccactgcactccagcctgggcgacagagcaagactccatctcaaaagaaaaaaaaaattaacttaaggttctttttaaagcttaacttaaaaactattttaatatcaagtgaaatagtgaaaaactattttcattattcaaactattattctgaccaagcattttgtggtctatctgtgcttccaattttcaggttatcttttgaggtgagatgaactgggttggcggactcattagcaggagggggatgctgcgctgtgcctggtacattgttaacaacagaaaataatagccattaaagggaatgaagggcaggggggatgattagggacctagaaacactggccaactgttctatctaaaaaacaaatgtcgaaagcccttttgggctctgagatactcagcacttaactgctcttgagcatttataagtagtcagacagatcgttgttcaaagcaaagattgagtgacagttcataccatcggcctcagttttctcctctgtaaaacgggacataaccgaaatgtcagtgggcttttgtgatgatttagagggcaagtatgatagcttctagctcaatgtttgacatgtggaaagtaattagatttattatatattataatattcattagaattttgaggtcaactctgcccatgtgtctaaccgtctaaaacaaaggatggatcactgtgggaaagaactgaacttggccttcggttcagaattcctgcccctctgggtgatggaaacgtaagaagagcaggagagtacaccctagcagttcacaatttttcattatttgccaaagagagaaaatttaggtgacgcaaaggacacttagaggcctgccgggcagcagcagctcggggaatgacagatcgatctctaccttggagaaggtagctgggaagagctgtgctttacggagagcttggggactgaggcacactcgcaatttatgcactgacctggattctggcagagcttgtgtttcgtgagacgtgggctccctttcaatcgcagatgcatctttttggagtagaggatgctctttaccatcctgtcctgtcctgtttttcctaggacttcctgttcttgggtgccaatgtccaatacatgagagtttgaggacaagaaagatgaagcttggaggtcacagctggatctgcttgttscatttccagctgtgcagcaygtctcagagattcttgaagaatgaagacatttctgctctcagctccgggggtgaggtgtgcctggcctctgcctccaccctcctcctcttcaccaggtgcatgcatgccctctctgagtctggactttgcttcccctccaggagggaccaccctcccygactggcctgggatatctttacaagcaggcactgtatttttttattcgccatctgatccccatgcctagcagagtgctggcacttagtaggtcctcaataaatatttattaaatgatgagatgatggaatcacctggtattctagctgagcctcatcactgcctgccctcttctgacctcaggggtctttggatagtcagccacatctatggtctccaaggcccctttctcatcgccgctgctatgggagcctcaatgagagaaccagggattctgtacatcatgtagccctggatctggcgctggtgctccgtctctaaggcccttgtcctgtctcaggcaggggctcacttcgacatcgctccctccctcatttcttgcctgctacagccaagggagccaatgatctcccggagcaaaaactcagcctcccgctgcttttccctcattgaagcaggtgtaaattaggaggaaatggatctgtctaagtttttggtccaaccccaataaaaagctcatccaactgttgtttatgagccccaagcctggagggagaggccgtgatttctaattactgaacaatgagcctttgatcagactaataaagagtcatttccaagttatgtagttgggctcccagggactgggagtcagaagactcgtttgataattttttttattgtgttaatgagcagatggatggagcttcaggctagcagataattcacagggaataatcccatttaccctgtgtgtgacagagatgtgttccaagatgggacgatgtgttgtcgcccagctggtggcagggtaagctgtggcttcaagccctctctcctctccatttttgttcatttgtttgccaccatccatccctatgaccgactggcaaaggacacaggcttcatccagtactagccatgtggccttgggaaggtcactttccccctggggtcctcatctatgaaatgatgatgatgattatagtagtcaattcctgggactgctataatgactgcattgggtaatctatgtggaaggatttatttagccaaatggggattccatatttattggctgggtgtgcttactaagcacctcctatttgccaggctttggggtcctcatggggagaaatacatggagcatgggctccattcctgatcctgcttttaagagtgatacttcctctccctctccctctccctctccctctccctctccctctccctctccccacggtctccctctccctctccctctccctctccccacggtctccctctccctctcccctctttccacggtctccctctgatgccgagccgaagctggactgtactgctgccatctcggctcactgcaacctccctgcctgattctcctgcctcagcctgccgagtgcctgcaattgcaggcgcgcgccgccacgcctgcgtggttttcgtattttttttggtggagacggggtttcgctgtgttggccgggctggtctccagctcctaaccgcgagtgatccgccagcctcggcctcccgaggtgccgggattgcagacggagtctggttcactcagcgctcaatggtgcccaggctggagtgcagtggcgtgatctcggctcgctacaacctacacctcccagccgcctgccttggccccccaaagtgccgagattgcagcctctgcccggccgccaccccgtctgggaagtgaggagcgtctctgcctagccgcccatcgtctgggatgtgaggagcccctctgcctggctgcccagtctggaaaatgaggagcgtctctgcccggccaccatcccatctaggaagtgaggagcgtctctgcccggccgcccatcgtctgagatgtggggagcgcctctgccccgccgccccgtctgggatgtgaggagtgcctctacccggccgccccgtctgagaagtgaggagaccctccgcctggcaaccgccccgtctgagaagtgaggagcccctccacccggcagccaccccgtctgggaagtgaggagcgtctccgccaggcagccaccccgtccgggagggaggtggggggggtcagccccccgcccggccagccgccccgtccaggagggaggtgggggggtcagccccccgcccggccagccgccccgtccgggagggaggtgggggtcagccccctgcccggccagccgccccgtcggggaggtgaggggcgcctttgcctggccgcccctactgggaagtgaggagcccctctgcccggccagccaccccgtccgggagggaggtgggggtgtcagccccccgcccggccagccgccctgtccgggaggtgaggggcgcctctgcccggccgcccctactgggaagtgaggagcccctctgcccggccagccgccccgtccgggagggaggtgggggggtcagcccccagcccggccagtcgccccgtcggggaggtgaggggcgcctctgcccggctgcccctactgggaagtgaggagcccctctgcccagccgccaccccgtctgggaggtgtgcccagcagctcattgagaacgggccatgatgacaatggcggttttgtggaatagaaaggggggaaagttgggggaaaagattgagaggttggatggttgccgtgtctgtgtagaaagacgtagacatgggagacttctcattttgttctgtactaagaaaaattattctgccttgggatcctgttgatctgtgaccttacccccaaccctgtgctctctgaaacatgtgctgtgtccacccagggttaaatggattaagggcggtgcaagatgtgctttgttaaacagatgcttgaaggcagcatgctcgttaaaagtcatcaccactccctaatctcaagtaccccgggacacaaacactgcggaaggccgcagggtcctctgcctaggaaaaccagagacctttgttcacttgtttatctgctgaccttccctccactattgtcctatgaccctgccaaatccccctctgcgagaaacacccaagaatgatcaataaaaataaataaataaataaaaagagtgataggtgtgctgaaaagagccagtattgattccagcctacctgttttgggtccctgggcaaggtatctccaagcctcagtgtcctctcctgtcaaatgaggctgggaagagctcttggcgggattattttggaaattgatgggttcaggttaagcttccgtgggtgcccagagaataaccaggtggtggtcaatggatgacacaattagatcacctgtcatacttggtgtccccagaagcagaccctgaagaaaagaggtgagtacaagtatgacggtgttgcaaaagtaattgtggtttttgctgttactttctttttttttttttttgaggtagagtctagctctgtcgctcaggctggagtgcagtggtgcaatctcagctcactgcaagctccgcctcccgggttcacgccattctcctgactcagcctcctgagtagctgggactacaggtgcctgccaccacgcccagctaattttttgcatttttagtaaaggcagggtttcaccatgttagccaggttggtcttgatctcctgacctcatgatctgcctgcctcagcctcccaaagtgctgggattacaggcgtgagccaccgcgcctggcctgactcccagtcttttctccagttaatctttcctgggtttttgatgagattcctaggaagggggtcttaagataattgcatttcttttggaaagaagttttcttattcagagaaggaaattccagacagagtcccttctggtgcttcaggaaagaggatcagagagctaaggaggtgagggaagatcagagggagaccttgagtctgcttttttagttcagcatatcaatgtgccatatattggcgtattgttttcygagccccaacagtgttatatctcgatggggtagtacaggacaacacagctggccctagagtcccatagcaggttctgacgccctgaaatctgactgtaaacatatgagtatcctggacagctccaacctgtagagaaggactggccttgggacaggaggttctgatctcaataaccggaagaactggactgtcaaagaaccttcaagagaccacagactcattgctgtgtagatctcattctcacacaaaaccaagatgccaccttggagcgcctcctcttgactacaacctgttcctcccttctgcccttctctgatttcccctctcctctcctcaacctgatcaagacctctagcctcaccggtgtcttccaggccgctattctgatttaatttgtctccataactaagcacagttcatcatctctaacagaatcctttcatctcctgacaatcctactttccacatccccagcctggggcctaggcgtaggtaagagaattaaattactggaggaaaaggcaggcaggctatagccagttgaggtctccttccatcaccaaaaccatagttctgtctgaatggcctgagcagcagcaacagcctagaaattggaatacatgatatttctaatgaggctctcaggtaaggtctcagaacccattcagtctcaagacatgctttttgtttttgtttttgtttctttgagacaaggtctggctctatctcccaggctggagtgcagtggcacaatctcggcaaacgacaaccttcacctcccggactcaagccatcctcccacctcagcctccagcatagtgggactacaggcatgcaccaccatgcccagctatttttgtgtgtgtgggtatttgttgtagagatggggttctgccatgttgcccaggcaggccctgaacttgtgagctcaggtgatccgccggcctcagcctcccaaagtgctgagattacaggcaggagccaccatgcccagctgcatttcttctttctttttatttattttttttgagatggagtttctctcttgttgcccaagctggagtgcaatggcatgatctcggctcactgcaacctcggcctcccaggttgaagtgattctccagcctcagccgcctgagtagctggaattacaggcgcccgccaccatgcccagataatttttgtatttttagtagagacttggttttatcatgttggccaggctggtctcaaactcctgacctcaggtgatctacctgccttggtctcccaaagtgttgggattacaggtgtgagccaccatgcctagcctgcatttctttctaagagcccaagatgtagcttagaagaaaagacactagcatgccaggatagtccatattgtgctgtaagtgaaggcagcatggagaagtcttggcaatataggtaacaaggtcaggggcagccacaggtctgaataggtggaaagatgagagctgctgggtatagtatcaaagggttaggcaaacaatagaaccaataagtgtgcgtgtttggaaaggacagaagaagaaaacaaaataaacaaaaccaaaaccaagtacagcattgggccccagggattagaaagtcaagcaggagctagcacggccaatgcactttgcttctttcactggaaaagtccaaaatatattttcctattagtacacagagatcttctgcatttgatttttaaaatttaacacagctacataatattccacatttgtgtatgtacaaaacaacttcttcattcttatttaaagatgcataggatctcctggtgaaagatacaatttatttaaccagttcctacttatgggtcatcaggttgttttaaaacttttgcttttataaataatgtttcagtgaatacctgtattcatatgccaattcatacgtgtggaggtacattgtagaataaatgcccagaaatcaaatcctataactctgactctttggttaatttagcagattgtcatttgctcactttctcttctttccagactttccccttctcttgaggtggtgcctgggtatacagggatgttgaaggggtccacatggcatcatgagagtggagtgaagcaggacatagtaaagaatttaaccttgctcaaagagagacatggcttttgtccttggcccctggaaggtaatctctaagcccttggaatgcttgcctggtaagagtgcctttgtttacctgggggcattggtccataacagatagtctaacaaggggagccacggcagggcttttgttcacatcatatcagcttaatctctgaagatgctgaagactgagcccagccacatgggcagccaaccagattggcatgatcaaggccccaaaagactctggagcttttcagatgattttcaggagaaatgactgagcccaaagaacaatagcctggaaggaagttcctatgagtgctgtgggaagtggtgggaaggtgaggggcggaacttcacaatgcacaaaggttgtcttatt

SEQ ID NO: 8806 - DNA, 86893 bp, Homo sapiens
aactgtggactgacagcagccggcacaaatcctgatgttcaataggtgctccagaagtgtttgttgaatgactaaatgattgaatgagtcctgttaggaaaccagaagtgagtatttttctgagcacttcagctgatttcactcatggtcactcaacaatcacgtttggagaaaaaagattatatttctgctcaaaggtgtgttcatttaaggtgagaaaacaaggcactggggcttggcaaagaatgccacaggccagtggtgagattattaggcagccatgagcaagagctggaggaacaattttaggctttgaaaggagaaagagggagaaaaaggctgggcgcggtggctcacgtctgtaattccagcactttgggaggccaaggtgggcagatcacttgaggtcaggagttcgagaccagcctggccaacatggtgaaaccctgtctgtactaaaaatacaaaaattagccaggtgtggtggcacatgcctataatcccagctactcaggaggctgaggcacgagaattgcttgaacccaggaggcggaggctgcagtgagccaagatcgcaccattgcattccagactgggtgacagagcgagactccctctcagaacaaaacaaacaaaaagaataagaaaatcaacccttacaagggagccactaattaactaggcacagtgctaggtgcatacatacatgtgatctttgctgaattccttagagagagaggaggctcttctcttggttttacaggagaaaccaaggcttacaggttgggcacagtggctcatgactgtaatctcagcactttgggaggctgaggcaggaggactgcttgagtccagaagtttgagaccagcctgagcagtatagggagaccccccatctctgcaaataaataaaaaattagctgggcatggtagcatgtgcctgtagtcttagctactcagaagactgagctgagttgggaggattgcttgagcccaggacgtcaaggctgcagtgagctatgggtgacagagcaaaacaaaataaataaataaataaataaaggaaagaaaaaaaagaaaccaaggcttgcagatgtgacttgccccaggtccccagggctggtcagtggcagcgctgagatctggacatctgtgtgaaggttactcacctaatgctcctctgtctccctgggtccttttctcttccaggggcaactggattggcgagtccccgtacaagatgggaaagccgtgctcctcctgtccccccagttatcaaggcagctgcaatagcaacatgtgcttcaaggggctgaaatccaacaagttcacgtggttctgaattttctctgggctttggtgcgcctccagctgggcctgaccctccatgtcctgccctcaaaaaactgggtggagaaataattgtttctttaaaggatatgagttagaatcaccccctgttraattttccctcctagatccccttcttaaatgtccaacatgggtcaaaagaaaatgacctccttgccttccttctttcctagttgcatctttcttttcttgggcctctgggaaagagccctgcatctttcattaattcggttctcagagaaccaaggctggaaggcatagaactggcaccttgggaccaggcataatggctcacacctataatcccagtattttgggaggctgaggtgggagaatcacttgagtcctggagttggagaacagcctggaaagcctggcgataccccatctctatttagaaacaaacaaacaaacaaataaaaaacctggcacctcggttttgtaactctcaggctttgtcaaacccaaatgactttgtccatccaatgaaaggaattccactgggtgcggcggctcacaccggtaatcccagcactttgggaggctgaggcaggtggatcacctgaggtcaacagttcgagaccagcctggccaacatggtgaaactctgtctctactaaaaatacaaaaattagccaggagtggtggctcgcgcctataatcgcagctactcgggaggctgaggcaggagaatcgcttgaacctaggaggcggaggttgcagtgaacagagatccagcgactgcattccagcctgaggacagagtgagactctgtctctaaaaaaaaaaaaaaaaagaaagaaagaaaggaaacccgctttcattcgtctcataacagtcaaccagtttctgggcagcctttgaggactcgtgattcgctccctgagttgggcacatttcaggcccatgattttgaaaaacattgaaattggcttgtggacatccgccccccsacccccactgcatggtactggagccacgacagagtccaggcccccctttttacagatgggtacactgaggctcagagcagggtgtaacttacccagagctgcatagcttgtctttgatggccaaggttagagctcagtctctcacagctscttcctgcttcctcggctctcagaactgagaagtgaaaaccaaagttggcctgaggggactctctctgggcctttttttctctatctctgcctcggtctctctctcttttgtctactgtccgttctatctctgcctgtttttgttttggtctctgcatctctgattctttttctcccatataatcttactctcattccaataaaccatttcccctctccccccaccatcccacccagggatcatagcacacaaaagtccttttgtctccagagayagtaaaatctcctccctcagaccttgccctgcagctggggcccactccctgcctggctggagagcttttcctttgaagacccgggatggaaaacaggcccttttccatggagtccctacgttgtcctggatggaatgaattttctcatcctgtgcatgtcaccccctcccattccacccccaataaagtcttttgagatccagtgtagtggctctttctggtccctccctctcttggctcccaagagggtcaaaacacaaggaatgggaactgggtgggggaagatgggtgagaggaaaaccagctcaactggaagaccaggggaaggaactaacagcgctttgggccccgctctgcagaaggctagatcaatgcacaagtgcatgcacgtatactattgctccactttacagatgagataaatgaggcatggggtgagtactagcttccaaatgctggaaatgagtgaaataagagaattaagaggttgggcgtggtggctcatgcctgtaatcccagcactttgggaggccaaggcggcagatagcttgaggccaggagttcaagaccagtctgggcaacacagtgaaaccctgtctctactaaaattacaaaaattagccaagcatggtggggcacgcctgtaatcccagctactcaggaggctgagacaccagaattgcttgaacccaggaagtgaaggttgcggtgagccaagactgcaccactgcactccagcctgggtgacacagcaagtctgtgtctcaaaaaaaaaaaaaaaaaagagagagagaattaaggacactgttgtgagttcattgttcttagactatatctttcctactttattttttggaatgggctctcgaaggcagtatcagaaatggaaaaccgaagagatcacgtggaattcccaccttacagtggcacttttggcttgtctcttccctggcacagtggctcatacctgtaatcccagcactttgggaggccaaggaaggtggatcacctgagttcaggagttccagaccagcctgaccaacatggtgaaaccccgtctctactaaaaatacaaaattagccaggcgtggtgctgtgtgcctgtaatcccagctacttgggaggctgaggaaggagaatcgcttgaacccaggaggcggaggttaaagtgagccgagatggcgccattgcactccagcctggacaacaagagcaaaactctgtctcagaaaaaaaaaaaaaaaaaaaagaacagatttaatgaaacttcttgaatcccagtttttacatctgtaaaatgggaatattgacagtgacaattcaatgacgttaagaatatacaatgctgacaaactaaagagttcataaatgccagtggttgtcatcctcattatcctggtgctcaggaaggcaatgtgagacctgttgaaatagcacgggctttggggtcagatgatgctgaattccagttctgtgttggctccttcgtagttatgtgacctcatgacgccacttcatgcagggggttacgtaccacttaaatctccagaacattttgggsaattgacatagggttagcaaacctcccccacccccatataaaaatattaatacttttttttttttctgagatggagtctggctctgtcgccraggctgcagtgcagtagtgcaatctcggctcactgcaacatttgcctcctaggttgaaacgattctcctccttcagcctcccgagtagctgagattacaggtgctcgctgccacacccagctaatttttgtatttttagtagagatgggattacaccgtgttggccagcctggtctcaaactcctgacctcaagtgatccacctgcctcagcctcccaaactgctgggattacaggcatgagccactacacccgaccaagaatattaatacttttttttaaaaaatatcgaagttatttatttatttatttatttatttatttatttatttattttgagatggagtctctctctgttgcccaggctggagtgcagtggcacgatcttggctcactgcaacctctgtccccctggttcaaacgattctcttgcctcagcctcccgtttgccaccatgcccggctaatttttttatttttggtagagacggggtttcaccatgttggtcaggctggcctcaaactcctgacctcgtgatcggcgcgcctcggcctcccaaaatgctggggttacaggcgtgagccactgcacccggccccaaaatctaacgtttgttatcactgttgttttagaaaagaaaggacattttaatgcaacccatgcccatctgtaggggctgaaggtccctctgaggtgattgataaagctgaaaaaagagactatgggaagagaagaggaatattatcaattagctattttagaagcagggcaaactatgagctaggtattcctataaggaaatgaaataatttactaaaaaacatacagcaagaaaataatagagctggagttttctgatttttctgagtccagaatttgtttcactgttctcatttcagctctctctaacaggatgaatgaccttgatttcagaatccccaagcaggtggtgagatccaaaactgagacaaaagaaacggggctgttccaaaaaaaaagctaggtggcaggtgtctaacatgccagggagctaaaacagagtgtgtgagtttcagcagcaggttgaatttagaatggggaaggagaccagaggagacgccagacaggatgactttgtcccattggcctggaggcagccccatgtttctccacccctcatatcactcaccagtttgtaatagtatctttgaatgacgatctgattaaggtccgtctcctccattagtccacaagtttcgggggtacatctactttgctcatttccatatccccagagtctagcacaaggcctggtacatagtaggtgctcaataaatatgttagatgaaaggaagataacacctctatgtactagcagtgagactccaggcatgcaatttctctctgtccttcagtcccttcatctcaaggtttaatttaaatatggtaacgcctgtatgcaactcccagcatccagtaggcactcactaaacacagttctccaccctccttttttcctctgcccctccctcggttttcccactacttcctgcatggtgacacacccatagtttggagccataaaacccaacccaggttggactctcacctctccagccccttctgctccggccctgtcctcaaattggggggctgatgtccccatacacctggctctgggttcccctaaccccagagtgcaggactaggacccgagtggacctcaggtctggccaggtcgccattgccatggagacagcaacagtccccagccgcgggttccctaagtgactggttactctttaacgtatccacccaccttgggtgattagaagaatcaataagataaccgggcggtggcagctggccgcactcaccgccttcctggtggacgggctcctggtggctgtgctgctgctgtgagcgggcccctgctcctccatgcccccagctctccggctgggtgggcttggccatggtcagcgtgaacgcgcccctcggggctccagtggagagttcttacggtaagtggggctgggggaagactggacagggcgggactgcggtcagctttgggaggccatgggacacctccccgtgtgtttcttacgggcccaaagctcctcctggagctcctctggaagggcaggaagccccacggaggcaatgtgaccgcttccctaagctctcaagccggggcatggcctgcttggtgcgagaagtgctgggaggggccgagaagccctggggcagaggcttggctcattttgtctgtccagaggccttcctgggaatgcatctcaggggtctttccaaaaccccacagagggtggggcttggaagcaccgtcctgtttcgatgcggggcaaattgaggtccaccaggagaggcttgctgggcctaggtcacgttgctggtgcattatcaagctgggcgtgggaccgggcagctcggtcgctccgcacctccgttggctctggataatggggaggaggtagaaagcgccgcgcagggtggagcgttggaaaatgagaatatcttgtgcggacgtgtgaaactcagatgcagggctagaaagcatgtgttactgagagtgaaaggctcaggctcactccttagggtgacccccacattggaagcaacccaatgtccctcagcagagggaagacgggtaaataaagcgtgagacgtctttacagtggaatgctatcccattgttcaaggaaacaacgcacatctgtgtgtgacagggaagaacctctcagttaaattaagtgaaaacggtacactgaagaactgtgtagttgctgatagcgaaacggatatagatgtatatatgtacacacgcgtatacgtgtacattccacgcatagaaaattcgtggaatgacacaataaaattggtgacaggtttgtttctgaggagggaaattcaagagaatgttttatcttttggggacacattttggattttttaaaagttgggtgccttttataaacctgttcaaatcacacacccgcacagaacttggtctctggaatccagcagacctcggggtctagttgtgactctgtcacacggctcaacattcacgtgcctcttgctttctttctgaagtggagacaggactaggatgtgtcttaagatcatggtggatgccgtggggaacaaggatgtaaagcccttgataccacgtgcattgcaaagacacaatcaacatttatgtcatcaattgctgaggacagagrgccagggaatgacagaatcagggcctgatctcctgactctagtcaggaagaatcttctttgctttgacccccatcaaacaggaatatgtgatgcactggaaatggcagaggctgaagaaaccaacagcctgggaacccatcccacacaccagctgtgtgaccttgggcaagacatttcccctctctgaacctatttcctcatctgtaaaatgaagataacaacaggacctatctcccagagagcggggagattagaggagatagcatagaggagattaagggtgaggccacccttaatccacaattttaagacctggagtatagatgccaatggatgacttggttgaacctgtggctaggggaagacattgtctctcaaaggggccagacagcttctggggaaggacagcccaggtcataaggctaagctaggggtgaacagaaggccccacagtgtctcttaaaggatgatacaataatataacctgacagcctttcactgtctcccacgtctctgcaccttgtaggatgtcctcatgtctcttcatctctgctcctgtgtcatactcattatatagcaracattcagcaattattagaatggttgcttctatcgacaggtaggtgggtgaatggatggatgaatgggttagtgaatgttctactattatctctcagacagctgtttcattttccaaacggctgtctgagataaataatattgtaatctccaaggacagaagaaaaaactaaggttcaagattaaaaaaaaaacacaaacaaacaaaaaatgtcatctgactcgagacttgacacaatccagctgttgctggccctctgctctaggccacagatatggctggacagagaaaggagaactccagtgaccttgcagtacatccacaaaaaatgagcacttttgtcctggggcagtggaacattcactgcagtgtatgtgtgcctatgtgtatgtgtgtgagagtggctgaaagaccctgatttgatatttttgataaaatacacctgggttagcatcctagatctaccttatttaaaaaaaaaaaactaaacaaaaaactgtgtggtcttgtgagtcaaatcattacccctctctgagcttcacatgttttatctgtaaaatgagctactgaagtctgctggaaggctccagaaaaaaaaaaaaaaaaaagaaaagaaaaatttgctttctgagaaaagaaacaagtgctccgaggaaacaaaacccctctcccaggctgggtgcagtggctcacgcctgtaatcccagcactttgggaggctgaggcgggcagataacttgagattaggagttcgagaccagcctggccaacatggcaaaaccccgtctctactaaaaatacaaaaactagccgggyatgatggcacacgcctgtaattccagctacttgggaggctgaggcatgagactcacttgaacctgggaggtagaggttgcattaagctgagatcatgccactgccactccagcttgggcagcagaacaagactctatctcaaaaaaaacaaaacaaaacaaaaaaacaaaaaacaaacaaaaaatcttcttctggggttctctaatggggataacattaatcatctcctaagatgactatagtagaggtgcattggtgggtcagggacatggcacatagcagagcctcagttagaggcagaggaagacatggctgttgtgaggatcaaatggaaggatccatgagtgcttagaacagtcctgggtccagagcaagcacgcaagaaatcctcgttgtggtttcatgtttttgagctttagcaggattctaaagagctgctctttggtgtggtgatgctgggtggacttggccctccctggacttccggtgcttccacggcacactggttttggctttgcggttctcgtcatcgctctgatcagatagttgctggtgtgaattgtggtgtctggctgccccaccagactataaactccgtgagttctgggacctgggtagtttgttcagccttgtttgtctcactatgtctcacatggtgactggcacagaagaaatgctcaataagcatttgttggatgagtgaaatgatgggcttaaaacagcgctacaatgatgatcatcaatgtcagccagatcccactctcttsccttccttcctctctgccctcctcactgcgttgtctttggtccttgtatttgccccattataacccaaactggctgtcccagcttcagctgtcatgtctgcacttacgtgtctgaagctggaggcaggaggagaagaggttttcctcagtgcccttgtttcttttatccaaaagcaaaacttccccagaaacctcctggcagactcccctagttcaaggaaagctgggaagacaagtatgtagtggaaagagatgggaaagccaagatggacctagaccagtgatttttctcttggggtgtggcacactcctgctccaaacagaactgaggctctggtataaatgagtttctcagcctcagcactgttaactttctggcctggaagattctctgtggtgaggggctgtcctgtgcactgtaggatgttaagcagcatccctggcctttactccccagatgccagtaacatctcttcccatcagttttgccaaagaaaaaatgtctccagaaagccaaatgtaccctggggcacatataaccccactgtgttataggagaacaaggtagttctgggagtgtctaccacaatggagtagagtagactgtgactcttgtgttgttctgctttgagtgccaggatcttgctcagtgccaatctggtactaccctgagtaactctgaggatgagatgctaaacatgcatatctgtgtgctaacctgactcctggccttattacttttctacccttattttccctttaacaagtttcccttggttatttattttgcttctttggtagttgctcatttccgtaagtacctcgaatctccttaaaggaaaggtctgtatctatctcattctttttgttatagtccagccttccacagggcctgatcccatgtagaccttgattgaagattaattaagtggatgaatgaatgggaagatggatggatgaataaatgtatgtttaggtgggtggataggtgaatggactgatgaatgaatgtgatgtgatgaatggatgtgatagatgggtggagggatgcatgaatggaatagagggagaaatagctggatggatgagacaaatgaatgagtaactggggagatggctgggtggatagatgggtggatggattaataaaaagatgttatgggtggatggttgggtgtggaggatgatgcatggatgggtaagtagatggatggaaagatatgtaggtgcatgtgataaatggatgaataagtagctggatagatgggtaggtggttaggggaaggatggatggacaaatgatgtgatgagtgggttgatgaaaagatggatgaatggatggataagaaggggtgggctgaggtagcctggaatagcagcatcttcaartgctctaaacaggacaagtgaagagataggggatgtcaacaatcttccatcagggcaatactgtatatctgtttttaagtgccaggtgagcctaatttttcctagctatgtaggcctagtccctttgaccaatagcatcagcttgaggacagatcagaggccattgtcggagacagtttggtgatgtggctctgccccttgaagctctatgatgatggtgctttgcttcacttctctggtcctcagtttcttcacccatcaaatgagccttggttgttgtgaagattccatgagctaatgaaagagaaaaggtaatagaagctataacaaacatgccgtgtccttgtgaagggtggataggcccaaaatcgagtaggaccccagatgctggctggctatgggaccgtgtccaatatcaggctatggctgttcccacccttcattcttaaaatatggcccctctccagcccttcccctatctcccctcccacatcaccttcccatcctacrtcaattcagtcttcagcccctatgattcacaaacctggttgcacataggaaactttttaaaacaattttggggctccactccagacccagtgaatcagtctcctggggtgagttccaagagtctgtaattttttgagctccttgtgtgacttagggtatgcagttcagttgaggtatggaaaccattgcctwactttctcccatttagtaaacagaggaactaaatatccagagtgcatcttgcctcaacccagaagcctcccgtattcattaattcattgttcatttgttcatttcttcaacaatcttccactggaggcttatggtatttaagacattttgtaaggcactggggaaacacaggaggataaaactttgcttcacgtggtggctcatgcctgtaatcccagcactttgggaggccaaggtgggtggatcacctgaggtcaggagttagagaccaggtagaggcagaggttgcagtgagccaagatcacgccactgcactctagcctggcgacaggagtcagactatgtctcaaaaccaaaccaaaacaaaacaaaaccaaaaaaaaacaacaaaaaaaacaactttgcttcagatcttaaactgtgctcagtttggcaggaggacagacaagccagcagcaaccaaagacagagtgccatgataaggacagcaaaggcactgtgggatacagagggacttaggagaaggggaaggggtcacagacttcttgaccttggaggagtagactgatatctaagctggaacctcggtttagcaggagtcagccgggagaagagacggtggggaagagtgttcccagctgagggaacagcatatgaaaaggcctggagcctggccacacactgctctgattttacttatatttgactgcaattaattccatcctttactgaaagtatcttgagacttgtctggttgtttcatgattgattaatcttattcctaaaagcatgctgaggctgggcatggtggcttattgtggattacacgcctgtaatcccagcactttgggaggctaaggcgggtggatcacttgaggtcaggagttccagaccagcctagtcaacatggtgaaaccctgtctctactaagcatacaaaaattagctggacgtggtgccaggcgcctgtaatcccagctactcrggaggctgaggcaggagaatcacttgaacgcaggtggtggaggttgcagtgagccgaggttgtaccactgcactccaacctgggcaacagagggaaacttgtcttaaaaaaaaaaaaaaaaaaaaagcatgctgagatgcttaagtgaaggaattgtgccttccatttttcctgactcatatgcctgtagcataaggatgggtcaatgataacgaaaggaatttgttttcatttaagccccttttatgtaatgggcaagatgttggctatttgatatgttttctcccttttaagccttgcaataacccatccaagtaggaaatattatctccattttataaacaaagaaattgagattcagagttgttaagtcacgtttccctgcatcgccttgcaaataggtgattaaaatctagtctgacaccaaatcttcattctttcagctattatgtcataatagcatccaaggagtttaccaccttctaccacctactagctgtgtgaccttgagtgaatgactcaattctcttttttttttttttttgagayggagtcttgctctgctgcccaggctggagtgcaatggtatgatcctggctcactgcaacctctgcctcctgggttcaaacaattctcctgcctcagcctcctgagtagctgggattgtagctggggttacaagcgcctgccaccatgcctggctaatttttttttatttttagtagagatggggtttcaccatgttcgccaggctagttttgaactcctgacctcaagtgatctgcccgcctcggcctcccaaagtgctgggattacaggcctgagccactgcgcccggccgacccaatcttttttgcctcagtttcctcatctgtcaaatggggttgatgataataccatttacttcacagggttgttgtgagacataaagtcaatatttgtaaagtgctgagtgtctagcacatagaaagtgctatgtgaatttgaacgattattattattatacctatagtgtgtgcatctactatatgcaaaggactggatgcttactaggtgttagcatcattttggctgttgtagaaacaacagagatgagtaaggaatagataactggtcccaggatgcaactgtctctggctggagactaaggacaaggctttgttgcaagccttctggggccctgggatgcccagggtctcctcttgggggtgctggttcatagatgggggcctgtgtggctccttcacagaggaggaggcagatgagaggcatagaaagggaggggacagacctatcctcatcagagacctgggagatggctctggccctggccctgggtagctgtttgtgacctcactcaagtccttctcctgctgtttctccatctactcttttttttttttttttttttttgagacagagtctcaatgtcacccagtggctctatctctgctcactgtaacctccacctcctgggttcaagcaattctcatgcctcagcctcccaagtagctgggattgcacgtgtgtgccaccacacctgacaaatttttgtagtcttggtagagatgggtttcaccatgttggctaggctggactcctggcctcttgtgatcctcccacctcggcctcccaaagtgctgggattacaggtgtaagccacagcacccagcctccatttcctcttttgagaaatggaggtatgacaaccatctggctcagccattgtcacacagtattccctgggtcctaagagtcaggaaagatgctgcagggttccctttgagggtaatgtgggtagggacgtgttcaaatggactagggcttagcctctccccacccttcaacctctggctccatcagagacacttctttttgacttttgtatatttctttttattttattttagagacaggggtctcgctatgttgcccaggctagcctcaaactcctgggctcaagcaatcctcccgcctcagcctcccagcccctgggattacctgctcatgccactgcacccggcactctgttttgacttttaaatgaaatatttaatggagggtctccacagttcaaaaatatttggaaaatcagaagaccacaccagtgtgtttcaaactgcaatcttaacccaggaataggtcatgcaatttttttyttattttttttttctagatggagtcttgctctgtcacccaggctggagtgcagcggcacgatcttggctcactgcaacctccgcctcctgggttcaagcaattctctgcctcagcttcctgagtagctgggattacaggtgcccaccaccgcggccagctactttttgtatttttactagagacggactttcaccatcttggccaggctggtcttgaactcctgacctcgtgatccacctgccccgacctcccaaagtgctggggttacaggtgtgagccaccgtgcccagccggtccttcaatttattgggattatattagttcagacaatatagcttatgtaacaagcaaatgcagactttaagttagaagtttattgacctctgtggcatagtcatccagggacccctaaggtcaccctagcccagaaagacactttcacttctactcacattccattggtgagaactagtcacatggcccttgccaaatgcaagggggtctggaagatgtggtccctagcggggcgggactagctgtaaagtttgtaaaggggagcgtgaattagttggtacacagttgatcgtctgtgcagtagggtcatgctcacacgtccctccacacacacacgttaaatatgtataacaagtgtaaatatacaatttaaaaaagtatcttttttttttggtttgtttttgttttgttgttgtttttgaaacagggtcttgctctgtcatgtgggctacagtgagccacaatcatggttcactgcagcctcaacctcccaagctcaagcaatccttccatctaagcctcccaagtagctgggaccacaggtgcatgccaccatgcccagctaattttttatttttatttttttgtagtgacaggtcttgctgtgttgcacaggctggtttcctactcctgtcctcaatcttcctgcatcagcctcccaaaatgccgggattacaggtgtgagctactgcacctggcctttacaattttttacataaaatgtttcaataaaaaagtgcatagatagatacagagatagcaataaagcaaatgtgacagaatgcaaccagttggtgaatttaggcgaagggatacatcagtgctcactatactagtctttcaaactttaaagtttgaaatttttcaaagtaaaatattggagaaaatgaaattcttaaaatttactagacctataagtagactaaaacaataagttataactaaagtaagatttggccggacgccgtggctcatgcctgtaatcccagcactttgggaggctgaggtgggtgaatcacttgaccccaggagttcaagaccagcctgggcaatatggcaaaaacccacctctacaaaaaacacaaaaattagctgggcctggtggtacacgcctgtagtcccacctactcgggagrctgaggcaagaggattgcttgagcccaagaggtgaaggttgctgtgagccgagattacaacaccacactccagcctgggtgacasagcgtaatcctagtgctttgggaggtcaaggcagaaaaattgccaccacacctggacttaaaaaatatttttactgaagtataacattcaaaacagaaaaaggcacaaatcatcaatgtatcgctttatgaaatttcacattttaacaaaagaatgaaataaaataaaatagaaaatatcayagagcatttcatgtagtaagagtaagatatgtatgtttttgaaacttttgttttatttatgtatatttatggatttgtgcttgatgttgtgataatagcaaaaatttatagagtacttactagggttttacacatattaactcctaattctcaaaatgtccctattggccgggcgcagtggcacacgcctgtaatcctagtactttgggagcccaaggtgggcggatcacttgaggtcaggagttcaagaccagcctggccaacatgctgaaatcccatctctactaaaaattcaaaaattagctgggcatggtggcacgcacctgtaatcccagctactcaggaggctgaggcaggagaatctcttaaacccaggaggtggagattgcagtgagccaagatcacgccactgtactccaacctgggcaacagagcgagatcctgtgtcaaaaagaaaaaaacaaaaaaaacagcatactttgtattaggtgaacccacaaagtacaggggccaattgtaggtagtccacaaacacttttaaatctttgtgcatttattgtatgttagaaaaatttatacatagcatattaaagcattaatataaaatatcttttaaaaattaaggtatatcttcaaaagaaaggaaaacatcaagtaaacaattatagataaataaagtacaggtaaaaggcagatgtggtaacaattgtatgaagaggaatacaagtgtctagggcttgggggccacacactaaacctggcatcagaaggcccagatctgggacccrgctcatttgttttctagcactaggttgtttttcatccttgtataacaccatggcccaggtactactctaagcactttataaaaattaactcctggccgggtgcggtggctcacgcctgtaatcccaacacttttggaggccaaggtgagtggatcacctgaggtcaggagttcaagaccagcctgaccaacatggagaaaccccatctctaccaaaaatacaaaattagccaggagtggtggtgcttgcctgtaatcccagctactcgggaggctgaggcaggagaatcacttgaacccaggaggcggaggttgcggtgagccgagatcgcgccattgcactccagcctgggcaacaaaagcgaaactctgtctcaaaaaaaaaaaaaaaaaattaacttcttggccaggcacggtggctaacacctgtaatcccagcactttgagaggccgaggcagacagatcatgaggtcaagagattgagaccatcctggccaacatggtgaaatgccgtctttactaaaattacaaaaattagctgggtgtggcacatggctgtagtcccagctactcaggaggctgasacaggagaatcgcttgaacccaggaggcggaggttgcagtgagccaagatcgcaccactgcactccagcctggtaacagagcaacactccgtctcaaaaaaaaaaaaaaaattaactccttggccagacatggtggygcacacttaaatcccagcactttgggaggctgaggcaagaggctcacttaaggttaggagttcaagaccagcctgagctacaaagtgagaaaataaataaataaataaattactcctttaatcctcacaaccgtctattgaggtaggtactgtcatcatacccatttctgagaaaacaaagtctcagagagactaaatagcttactcaaaaccacgcagcgcatgagaggcggagctagaattcaacatcaaggattgtattagaaaaggcaataccagcttatcaacccaaaacacgagaggagagtttatctctccttcacgcagttgtccagggtccccaactccttcctccctagatggaagatgggctttttttttttgagacataaatatatatatatrtgtgtgtgtgtgtgtgtgtgtgtgtatacatatatgtgtgtgtgtgtgtatatacatatatatatatatatatatatttttttttttttttttttttttgagacagggtctcactctgtggcccaggctggagtgcggtggtaccatcttggctcatcacaacctccacctcctgggttcaaacaattctcgtgcctcagcttcctgagtggctgggattacaggtttgcattaccacacccagctaatttttatatttttagtagagatgggattttgccatgttggccaggctggtgtcgaactcatgacctcaagtgatccacctgcctcggcctcccaaagtgctgggattataagtgtgagccaccaggccctgccaggaagatgggttttatttgaaccactgggccctactgggatgggtagaattttctgtatcattctgggatccacatcctcctctgaaaatggggttaataatgctagttctatttacccctcagggtagctctgctgctcaaggggatagaggcaagagtgtcctgcaaactgcaaaaagttccttgaatgtaaaatgttagtatgtattgttaatgatattgaccaaagctacattaccatgttacagtgaagattaattgaaacagtgcatggaaagaccttggttcacatacagacaaagtcagctgtgagtaatagccataatagtaatgtggttatgcaatttaaaatattgatttatctccaaattgggatatagttgtataggatctttcttactagcaagttaacacattacgtctataactaaaaaatcaagaagtcttgatttcttgagaagtcagtataaccatgatgtttagaaatacaaacaagaggctgggcacggtggctcacgcctgtaatcccagcactttgggaggccgaggcgggcagatcacaaggtcaggagttcgagaccagcctggccaacatggtgaaaccctgtctctactaataataccaaaaaaattagctgggcatagtggcgggcacctgtaatccctgctactgtggaggctgaggcaggagaatctcttgaatgtgggaggtggaggtttcagtgagctgagatcacgccattgcattccagcctgggcaacaagagcaaaactccatctcaaaaaaaaaaaaaaaaaaaaaaaaaaaaactgggccggccacagtggctcaaaatgctgtaatcctggcattttgggaggatgagtggggggatcgtttgaacccaggaggtcgaggctgtagtgaacaaacatcatgccactgcactccagcttggatgatagactgagaccctgcctcaaaaaaagagaaaggaaaataaataaataaatgaaaatttaaaaggaaaagaaaatatttaaacgctatttcaaacaatctcaaatgtacctggaaacagttgggacaggaagtcatgaagggaatggggcagagttagagaaggtcagagtacagccatgtttcacatcccagctgaaactcctccaacagctttgtatcgcccttcaaatacaacctgagctctttttctttctttctttcttttgtttttctgagttggagtctcactctgtcatccaggctagagtgcagtggcatgatcttggctcactgcaacctccgcctcccaagaagctgggattacaggcgcgtgtcaccatgcccagcaatttttgtatttttaatagagtcagggttttaccatgttgccaggctggtctcaaactcctgacctcaagcgatttgtccaccttggcctcccgtgagccgccgcgcccggccctgggctcttttctttgaccaaaaggctctcacaggctctgactcttgtctgatggtctctcgtctttctccctttggtcactgcagtcagccacactggacttttgttttttttgtttgtttgtttgttttgcgacggagtctcactctttcacccaggctggagtgcggtggcgcgatctcggctcactgcaagctccgcctcccgggttcacgccattctcccgcctcagcccccccaagtagctgggactacaggcgcccgccactgcgcccggctaattttttgtatttttagtagagacggggtttcaccgtgttagccaggatggtctcgatctcctgaccttgtgacctgcccgcctcggcctcccgaagtgctgggattacaggcgtgagccacaacgcccagccacactggccttttgacaatccttcaatcacgccaagcacactcctgccattgggcctttgtacttgctgttctctctgccaggaatgcctcttccccagatctttgcatagctgatttcttctcattgtcagggccttagttcaaatgtcctccactcagagcagcctcccttgaacacccaaatctaagcctgccccacctccatcccttgatagcaattccattatcctctacagcgctgaaattacgtattccttgatctgtttatcatctgtctccttcacagaagttccatgacagcagggagttaggctgtcttgtcccctgctgtatccccagcatgtagaacagtgcttgacacacagtaggcgccccataagtatttgcggaatgagcaaatacagatggggacagctgagtcagtagggtgagcagctggatgggccagtagtggagggaggaaacggcagcctctgcctgggccttgccctgggtaaacagacctctctctccccagacagccactgtttgacgactgtctgccatgggcctggctgagcctgggccgccaaactgccaacgcctctgtattctctgggacaagcagtggaggcagccatacctccagcagagtttgtgaaggagcaggtcagaaagttgtccaaacaggcatgaggaagggcagaggaggtggggagacagggagagagcaggcggccctgccctgggcagagccagagaaactggagggaggcctgggtgctcccctgggcagcttcccaggcaaacccagctgcctgcagggctcagcgctgggagcaggttgtggtcccagctctagccctgacacacacaggatctcaggtacttgacatttgtaggccttagcttccttacttgtaagttagaggctatgggcagattagtggctttcaaacaattttttttgttgttgctttttgtttttgagacggagtctcaatcttgtcgccgaggctggaatgcaatggttcgatctgggctcactgcaatctccgcctcccaggttcaagtaattctcctgcctcagcctctggagtagctgggattacaggcgcgtgccactactgcccagctaatttttgtatttttagtagagacggggtttcgccatgttggccaggctggtcttgaacacagcaagattctgtctctacaaaaaatacaaaaattagaggctgggcccggtggctcacacctgtaatcccagcactttgggaggtggaggtgggcagatcacttgaggtcaggaattcgagatcagcttggccaacagtgggaaatcccatctctactaaaaatgcaaaaattagccaggcatgctggagcacgcctgtaatcccagctacttaggaggctggggcaggagaatctcttgaacccaggaggtggagattgccgtgagccaagatcgccactgcactccagcctgggcgacagagcaagaycctgtcaaaaaaataaattaaagaaaatcccaactttcacctcctttaaaaaaagtgaaggtctagcaacactgatacctatgagacaacagtctcctggagccactttagattctcatgcttcctctaatttgcygtagtccccactattccttagtgtccccatacggaaacttattaatgaacataaatcaccatgtttgctgtattgtttttcttagaggaacgtgtgaactttgctcacaccctatctgttccatttatttcagttacttctctgggtattgagggcacttgagtgtgggacccctgatcactgagaccaaagcagagttcatttatttgcacgagcaatcttctatttcatagatttaccatgtttttaagtgactacaagaaaagtttaaattatgtctgtggctcacattctatttctattgrccagcactggccgggtccctcagattctatagcagtgtacgtgtgcttgctgctaactcattctgcctccattttccattcttgcgtagaccaatcccagtcaaatctcttgggctggtgtcttctccccaccccacagttatctttggtgcctccaccctggttagctggccacctgtctgtccagaggatccaggctccagaactccaggcatgtcttctagaattctccacatgggaaatctcactcccaggccccatctggcagccattgtgttttctttatcagacattcacataaaacaatagtcaatttgaaagctaaatacacatccattcttctgtctccagcctgtaaatttaccccaaatccagtaatttgggaggtggagttggtgggaagaggtttttttttccccctcttctccagggcaagtcatatagtttttctggagatgaggtggactgagtttgggggaagaacacaggtccatctacagtgaaagcgctgactttgtttttggagaagatggtgtcatggcttctctggggagatgagatgagggaatcctgaagacttagggggccgggaggaaaaggaatcttggcaatgatgaagacaccttcaaatgaaggggctaatagggtagtggctgagaatttgtgctgcagtcgggagggcttgggttagagctacatccacagtatgaccttggacaggtgactttatctctctgatcctcagtctcctcatctgtaaaataaggataagaatagacttgacttccacttcaacgagaagtgaaacgagatatcctaccactgygctttgcacataaaggctctataaatgtcagctgtcatcataaagagccaaaagtggcatttggagtaaatctgatttgtttttaagagatagggttttgctgtgtcacccgggctggagtgcagtggcatagtcaaaacccactacagcctcaaattcctgggctcaagccatcctctcgcctaagcctcacaagtagctgggactacagacacacaccaccatgcctgtctaacgtttactttttaatttttttaagttttaaaattttctgtagagatggggtcttactgtgttgcccaggctggtctcaaactcctagcctgaaatgatccttccaactcagcctcccaaagcactgggattacaggtgttagccaccacacccagcctagtttaattcttttttaatcatccttctctgcatttttgtaattcctctaccatgaacctgctttagttaagtaagaaacagttaactgggggaggagaaataaaaccaaacccctaaaaagcccctaataaacccctaaacgtggggtccaacatgaggtgttatggctgggaaaaggtaagagatcaaactatacacacccttttttttttaaattaaactttttagttttttcagagacagtcttgctccattgcccaggctagaataatggcatgatctcggctcactgcaacctccgcctcctgggttcaagcaattctcctgcctcagcctcctgagtagctggaactacaggcacgcaccaccatgcctggcttctttttgtatttttagtagaggtggggtttcaccatgttggccagcctgatctcgaactcctgacctctggtgatccacctacctcagcctcccaaactgctgggattacaggtgtgagccactgcaccaggccttaattaaacttttattttagattcagggggtacatgtacaggtttgttacatgggtatattgtgtgacactgaagtttaggctatgattgagctcatcacccaagtagtgagcatagtacccaacagagagttttttagcccttgcccttcctctagaagtccgcagcgtctattgttcctctcttgatgtcaacgtgtacccaatgtttagcttccttttacaagtgagaacatgcagtatttgtttttttgtttctgtgttgattcacttaggatgakgtcctccagctccattcctggtgtggcaaaggacacgactttgttcccttttttatttttttgacactgtccttgaacttggttgaggttttgttcccttttatggctgcatactattccatagtgtatatgtaccacattttcattatccattccactgctgatgggcacttaggttgattccatgtctttctactgttttgttttgtttragatggagtctcactctgtcacccaggctggagtgcagtggcgcaatctcagctcactgcaacctctgcctcccaggttcaagccattctcctgtctcagcctcccaagtagctgggattacaggcatgtgccaccatgcctggctaatttttgtatttttagtagagacacagttttaccatgttagccaggttggtctcgaactcctgacctcaggtgatccgcccgcctcggcctcccaaagtgctaggattacaggcgtgagccactgtgcttggctgatgtctttctattgtgaatagtgctgtgtagaacatataagtgcatgtgtctttttggtagaagaattcattttcctttggttatataccaaatcatgaaattgctaaattgaatggtggttctgttttaagttctttgagaaatctccaaatagctttccacagtggctgaactaatttatattcccaccaacagtgtataagtgttcccttttttccacagccttgccaacatctgttatttttttgactttttaatgacagccattcttcagatatcaagggtggggacaaaaaaagaaacttaataatcattttgactagtgtgagatggtatctcacgatttcatttgcatttctctgatgattagtgatgttgaacattttttcatctttgttggccgcttgtacatcttcttttgagaagtgtctgttcatgtgctctatccactttttgttggggttctttgttttttgcttgttgaattgtttaagttccttgtaggttctagctccttgtagaattgctaagttccttgtagacctttgttggattcagagttcgcaaatattttctcccattctgtaggttgcctgtttactctgttgatagtttcttttgctgtgtagaggctctttagtttaattaggtgtcacttgtcaatttttggttttgttgcgattgctttggaggatttagtcataaattttttgccagggaaatgtttttgttttttttttttgagacagggtcttgctctgtcacccagggtgttaataacttaacaaactgagaccccaagaggaaaggtgattcggccaaagtcatacagtaagttagtggcagagccaagactagaatggtggactgtgggtgttggaagggaactttgaggttgttagggcagcctttcctaaggcgaggcccctcagacaagaaggattctattgttagatgtttgaaaactgctgaattaaagaaagctgcacaaatttcattatccgagaacttctcagaattcttaacacatgacaataccttggccactccaagaaatgcctgcagtgtatagggccctgaattagtttcaagagtcccttgaaggacattgacacctatgcaagctctccctgctctcagacagagaaatgctatatcttagatatactcctagttgcttttaaaaaataggattctagggccgggcatggtggctcatgcctgtaatcccagcactttgggaggttgaggcaggcggatcacgaggttaagagtttgagatcagcctgaccaacatgatgaaactctgtctctactaaaaatacaaaaaaaattagccgggcatggtaattagccgggcrtggtggcatgcacctgtaatcctagctactcaggaggctgaggcaggagaattgcttcaacccgggaggcagaggttgcagtgagccgagatcatgccactgcactccagcctgggcaacagactgagactctgtctcaaagaaaaaaatatatatatagatttctagatttttatccacggttgcttgtcattgtgcaaattgttgtcattgtgcaaattgtatgatttttaaaattatactaccaagttgtctgtcgctggtatgtaggaagatggttgacttttttttataatctcatttctcctttttttaaagtaagaaatattacaaatatgcagagaagtatagagaataatattatgaacatttatgtatccacctctcaattttgtcaaatcttactacatgaccatgttttctttggatgttgtttgtttgtttgtttgttttaatgacaaattaaacattacacttagagttgaagccccttgtcttcctgatcccatcaccctgccacccttatcagtggtgatcatggtcaccatttggtatttatcatgtgtatttggtatttatctggtaatgtgtcattaccagacacattttcacagttctaccatacgtggctatataagcaaagtaaaatattttgcttatctggaaaatttatttaaatgatatactgtacatatcctgcagcaacttccttttattactcctcataataggtctctggatcttttcatgatgatacaagttgcaccagaccactcatttaaaatgctgtgtaggctgggtgcagtggctcacctgtaattccaacactttgggaggccgaggcaagtagatcacttaagcccaggagttcaagagccagcctgggcaacatggtgaaaccctgtctctatcaaaaaataaaataaaaaagaaataaaatagataaaatgctgtgtatccatgaagtactatacagtcataaaaaagaatgaaatcatgtcctctgcagcaacatggatatggctggaaaccattatccgaagcaaactaatgcagaaacagaaattcaaataacatatgttctcacctatacgtgggggctaaaccttgggtacacatggacataaagatgggaacaataggcactggagaaaccaaaggggttagagagggagggggcaaatgttgaaaaactacctattgggtaccatgctcattacctgggtgatgaattcattcatactggaaaccccagcatcatgcaatatacctttgtaacaaacctatacgtgtacctcctgattcgaaaataaaagttgaaataacgggccaggcaatgtttaaaaacacatgcagccgggcgcggtagctcatgcctgtaatccaagcactttgggaggccgaggcgggtggatcacttgagatcaggagttcgagacaagcctgggcaacatggtgaaaccctatctctattgaaaatataaaaattaaccaggcctggtggtgggcacctgtaatcccagccacttgggaggctgaggcatgagaatcgcttaaacctgggaggcaggtaaaaaaaacaaagttgaaataacaaaaaataaaataaaagtgtctgtaaatatcctgagtatatttattctgttttgtttatttgtttgttttgagatggagtctcactctgttactcaggctggagtgcagttgcacgatcttggctcactatctcagatgatgctccaaagactattcttatacctgtggatgagagtttctctaggtaacatgcagagatggaatttctgtatcttagacagtggatatcaacacttttaagagatgttgctaaattgctcattcttgaatgccaacttccacttccaacaatagttacagagttttggttgctctacaacctcatcagcacttgattttgtaagatactgaatgtaaaattatgcttcactttcaaatttacatttcctctattactagagaaggagaggctcttttgccatttgagcttcctacattatgagtgtgcttgtttgtatcctttgaccatttatctattgtattatttacctttccttatcaatttgtaggcattttttagcactcttagaaacatcttttatgcatgtatttttttttttttttgaaacagagtcttactctgtcgcccggctggagtgcagtggcgtgatctcggctcactacaacctccacctcccaggttcaagtgatttttctgcctcagcctcccgagtagctggggttacaggcatgcaccgccgcacccagctgatttttgtatttttagtagagacagggtttcactatgttgcccaggctggtcttgaacacctgaccaaaggtgatccatccacctcagcctcccaaagtgctgggattacaggtgtgagccaccacgcccagccgaccatttttaaacgtacagttcagagacattaaatatattcacattgtaatacaaccatcagcaccatccatcacctgaacttttttcatcttcccacactgaaactgtacccattagaaaatagctccccttgggaggctaacatggagaaacctcgtctctactaaaaatacaaaataaatactaaaaatacaaaaaaattagccgggcgtggtggtgcgtgcctgtaatcccaggtactcaggaggctgaggcaggagactcgcttgaacccgggaagtggaggttgcagtgagccgagatcgcaccactgcactccagcctgggccacagagagagaccccgtctcaaaaaaaaaaaaaaaagaaaagaaaagaaaagaaaatagttctcctttcttcccaggccctggcaaaccccttctactttctgtctctgtgaatttgactactttcctgtaggctagtggaatcatacagtatttgttctttgtgactagcttttcccctagcataatgccctcaggatccatccatgttgtagcatgtgtcagaatttccatcctttttaaggctgaataatattccattgtatgcatataccacattttattgatccattcatccattgattgacacttgggttgcctgtaccttttggctattatgaataatgctgctatgaacttgagtatacaaatctctcttccagatgctacttttggttcttttgggtatatactcgggagtacaattgctagatcatatgatagttctatttttcattttttaggaagccgccatactgcttgccacagaagctgcactattttacgttcccaccagcagtgataggaacgtaaaagggttacaatttctccacatcttcaccaacacttactattgtctgttttgttgttgttttataatatccatcctaatgggtgtgaggtggtctcttattgtgtgttttgtttgtttgtttgtcttggttttttttggagacatagtcttgctctgtcgcccaggctggagtgcagtagtgcagtctcagctcactgcaaacttctcctccagggttcaagcgattctcctgcttcagcctcccaggtagctgagattacaggcatgtgccatcacacccggataatttttcttttccttttttttttttttttttttgagacagagtctcactgtgtggcacagactggggtgcagtggcgcgatcttggctcactgcaacctctgcctcccaggttcaagcgattctcctacctcagcctcctgagtagctgggattacagatgcatgccaccatgcccggctaatttttgtatttttagtagagatggggtttcaccatgctggccaggctggtcttgaactcctgacctcgtgatccgcccgccttggcctcccaaagtgctgggattacaggcgtgagccactgtgcctggcccacacccagataatttttatattgtttagtagatttgggattttgccatgttggccaggctggtctcaaactcctgacctcaagtgatccacttgccctggcctcccaaagtgctgggattacaggcatgagccactgtgcccagcctcttattgcagttttgatttgcacttccctaatgattagtgatgttaagtatctttttatgtgcttaatggttatttgtatatcttccttggagaaatgcctattcaagtcctttgccaatttttttgttttcttgagacaggtcttgctctgtcacccaggctagagtgcagcagcaggatcgtggctcaccacagcctcaaactccttgactcaagtggtcctcccacctcggcctcccaagtaagctgggactacaggtgtgcagcatgcctggctaatttttaaatttttctgtagagacaaagtttcactatgttgcccaggctggtcttaaactyctgagctcaagcaatcctcctgcctctgcctcacaaagtggtgagattacagacttgagccactacacctggcctctttgtccatttttaaagtttttggttgttgttattgagttgtaagagttctttatatatttcggacattaaccccttatcagatatatgattggcaaatattttctcccattctgtaagttgctttttcactcagtcaagtgtcctttggtgcacaaatttttctaattttgatgtagtccaatttatctaatttttaaaaatttcctgtgcttttggtgtcatatccaagaaatcatcaccaaatctaatatcatgaagcttttcccttatgttttattccaaaggttttatacttttccgtcaaactcatttttagttaattttcgtatatggtgtaaggaaagagtctgatttcattcttttgcatgtggatatacagtttcccaaacatgaatttggttttgatagtactttgttaattaagacttttgcacctggtagacgctctttgdcctctaacccactggaatcctctcaccatccttccctgacagttgaccatttagcttgggcttaatacttccaatgacggaatactcactacttaataaagcagcttttcctgtggtagaacaattgtattttatagaaagatctccattttgagcctcaagtttcctccctgtagcatccacattttggtcctcgttcattctctgaagctgtaggaatcagtgagagcttttttttttttttttttgagacagagttttactctgtcacccaggctggagtgcagtggcacgatctctgctcactgcaacctccaactccagggttcaaatgattctcctgtctcactctcctgagtagctgggactacaggcacatgacaccacatctggcttatttttgtatttttagtagacggggtttcaccatgttggccacrtgaaactggtctcaaactcctggcttcaactgatctgcctgcctcagccccacaagtgctgagattacaggcgtgagccacttcacccagccagtgggcactcttttccaaaggaaagtactttgttgccttttttttgagactgagtctcaatctatcacccaggatggcgtgcagcggcacgatctcagctcattgcaacctctgcctcccaggttcaagtgattcttgtgcctcagcctcccaagtagctgggattacaggtgactgccaccacgcccggctaatttttgtgtttttagtagagacagggtttcaccatgttggtcaggctggtctggaactcctgacctcaagtgatccacccacctcagcctcccaaagtgctgggattacaggcctgagccaccgcacccggcaggaaagtactttgaattgagtaaataacgcaactatatgctgggcagctacctgccaggtttataaggtttaacacatttactccacaaagcaatctatgaaaaggtcctatcattgattcctattttatagatgaagcaaataaggcttgaagagcttatgattttagcaaggtccaacagctatgtaaatggcaccactgatatttcaaaggcaatggccctgaccactctgctacaccacctttctctcctcttctccaatacccagcccagaactcttttggatctttgattattcttcaaggggcatagctttctttctttctttctttctttttttttttttgagacgaactctcgctctgctgccgggmtagagtgcggtggcgagatctcggctcactgcaccctccgcctcccaggttcaagcaattctcctgcctcagcctcccaagtagctgggactacaggtgcgtaccactacgcaaggctaatttttgtatttttagtagagatggagtttcaccatgttggccaacatgatctcgatctcttgacctcgtgatccgcccgccttggcctcccaaagcgccaggattacaggcatgagccatgccgctgcactcggcctaaggggcatagctttctcatcctctgccatcctaggaaaattttaagtattcatattaaaatgaaaactaaacacaattgtccatatatgctccttaggagtagaatgccaaggacctcttagctcctctgacctgggaactacattctctctaatgatacatacgactgggttagaggtttgggcagctgccaccaagtaaaacctctagaattttgctatgtcactttctgctaaggtagcttttcccatctacactaaataaataaatcatccaggtgatttatttttaaccaatgcagaggattttttacttatctccatggagttcaaacatttctccaggctgggtggggtgactcacgtctgtaatcccaacactttgaagactaagaaggggcagattgcttgaacccaagagttccagaccagcctgggcaacatggtgaaatcccatatctacaaaatatagaaaaattagccaggggtggtggtccacacatgtagtcccagctactctggaggctgaggtaggaggatcatctgagcctggagacttggaggctgcagtgagctgtgatggcgccactgcactccagcctgagtgacagagaccctgtctcaaaaaaaacaaacaataattcaccaaatctatttggatctggatcctgccatcattttataggtaatgcctccatagcactcactaagtgccaggcacacttctaagccctttttatacattaacacaaataatccccaccacgacctaatgccatacacatcattatggtcactattttgcaaataagaaaacagtcacagagcagttcagtaacttgtccagggtcacacagctagtccatgactgaaccagaatttaagcccaggatgtcaagttccagaattggtacactcagcctcaatactgtgctgccttcaaatattctgacaatcttagacagctttggggatccaaaagattgagaagtactcttggggacctcttttttttttttttttttaaatacggagtctcaactctctcccccaggctggagtgcagtggtacaatctcagctcactgcaacctccgcctcctgggttcaagtgattctcctgcctcagcctcccaagwggctgggatattacaggcacatgccatcatgcccagctaatttttgcattttaagtagagacaggatatcaccatgttggctagggtggtcttgaactcctgacctcaagtgatctgcccacctcagccccccaaactgctgggattacaggcatgagccaccgcacctggctcccattttttttttaagacggagtttcactcttgttgcccaggctggagtgcaatggagcgatctcggctcactgcaacctccgcctcccaggttcaagcaattctcctgtctcagcctcctgagtagctgggattacaggcacatgccaccacacccggctaatttttgtatttttagtagagatggggtttcctcatattggtcaggctggtctcgaactcctgacctcaggtgatcttcccacctcggcctcccaaattcctgggattacaggtgtgagccatcacgcctggcccctggctcctttttttttttttttttttttttttaaataaagaccaaaggtccagaggctttgaaaggcaaatagtattaagtcaggatttgatatcaggatttctttcattctgtttattttctcattgctttctacttatgatactgtttcatttggtagtaataatatttctttctaaaataaattgaagtaaaaagaagtgagttgatgtaagaaaaatgttacagatatgaaaaaatcataatggtcattaaaaaattagtgaaactttggaaagactgtgttcagtcaagtgaagtgaagttagcttgcaaccacaaaaaaacccctaagtctcaatggtttgaacagcaaagttaattgctcacctatagtacacgcccagcatgggtcggcagggggcgctccgcgttgtggaacgattcatatctatacttgcttccccaacaagggcagcactggcctttaaagcttctgcccaggtgtgacacaggttgtttctgctcacatctcgttacctgaaacaagtaacatggtcacatctcatttcaaaggaagcaagaaaatgtaatccccatcatgtgccggaaaggagagaaatagaatagttgagaacagccctcagagagactataagtaagggggcataaaagatgggtctagagagataggctgagtcatgactcactgaatttgtctgacgtagatcatgatggcccatcccaccaagtggccaacatttgttcccagaaaagggagtgtgatgatcccccagaaagaacacagtctgacaacattattctgatgagcagacacacctctcaggctgccactcaggagtccttttgggtggggaggtggggatgctgatatttcctaagtggtttcagctgaactctgtgatctttttttttttttttttttttttttttgcctattccctgaagggagatgaggcaatttgggctttggctgagctagggtttggttctgtcaccacttgctatctagggaagggtaataattggaaaggagaggaattcaaggagagggtccaggtgggtagggagcctcacacagggtttggtgatcaggtgattgagaggcctccttgaggagttttcaaagtgcggtctgagggcacctggtatcagaagtgcccagaagctcrttaaacacttgggccaggtgctccatggctcctgcctttaatcccagcactttgggaggctgatttgcttgaggctggggttcaagacaagcctggacaacatagcaagacacctccccccgtctctattttttaattaattaatttgtttgtttattaatttatggactctcactctgtcgcccaggctggagtgtagtggcctgatctcttctcactgcaacctccgcctcccaggttcaagcaattctcctgccccagcctcccaagtagctgaaattacaggcatgcaccaccacacccagctagtttttgtacttttagtagagacaaggtttcaccatgttggccaggctggtcttgaattcttagtctccagtgatccacctgccttggcctcccaaagtgttgggattacaggcatgagccaccatgccccacctctatttattaaatattttcttttttttaatctgatgactaggcccactgttggtcctggcacctggaggtaggaccccaggcatctgattttttttgttgttttttttaaggcagggtctcgctctggcgcccaggctggagtgcagtggcacgatcttcactcactggaacctccacctcccaggttcaagcgattctcctgcttcagcctcccgagtagctgggattacaggcatgcaccatcacgcctggctaattttttttttaatagagacagggtttcaccatgttggccaggctggtcttgaactcctgaactcaggtgatccacccacctcccaaagtgctgggattacaggcgtgagccaccgtgcccagccaccatctgattttttttttttttttttttttttgagacagagttttgctcttgttaaccaggctggagtgcaatggcacgatcccggctcaccacaacctctgcctcatgggtttaagtgattttcctgtctcagcctcccaagtagctgggattacaggcatgtgctaccacgctcggctaattttgtatttttagtagagacgaggtctcaccatgtttggcaggctggtctcgaactcctgaactcaagtggtccacctgcctcagcctcccgaagtgctgggattacaggtgtaagccacctcgcccagctgccatctgaatttttaataatggccccagatgattcttatggacaccaagatttgagaagcattgaatgactgagagaaaatttcttgtaagggtagaagcccagcacagtggttctcagtggagataatttcaacccccaagggacatttataaatgtctggagatagttttggttatcacaccttgagggtagggaaaagtgctgctgacatctagtggctagaggccagacatgctgccagggacaatgtacaggacagtccccacgacaaagaattctctagcccaaatgtcattagtgcttaggtcaagaaaccctggttagccattaagagtttgaacctttctaaatgttggagcacatacgatttttaaatcttcaatttttattttattttccaaaatttctactatatgcatagaatccttttcattgaatacctgttacgcaccgagcacttgaagtttacatcactatcagttcctcttgaaagaccttttcagtcattcatccaacaactatccattaaacacttactaaaatgtattccaggccaggtgtggtggctcatgcctgtaatcccagcactctgggaggccgaggtgggtggatcacctgaggtcaggagtttgagatcagcctggccaacatggcgaaaccccgtctctactaaaaattaaaaaattagctgggtgtggatcccagctactcaggaggctgaggcaggagaattgcttgaacctgggaggcggaggttgcagcaagccgagatcgtgccattgctctccagcctgagtgacaagagcgaaacttcatcttaaaaaaaaaaaaaaaaaaaaaaaaagaagtattccaggcagaggggaaagtatatgcaaaggcccccaagacaggaaagaaaaactttaaaatggctagtatgcctgctgctgataggggtgggggcaagtggaatgaaatgaggttggacacggagggatataaaaacaagggcgtgcatggcctcacagtgttaagtgggagttgtatgagttttgttataaatgcataggaagtcataaaaatttaagtagaagaggatctgagccaatgtacatttgtacaagatcacccttggcccctgagtgaagagtagggggtagggaagccacaggagaaaaagtgaaggggtggggtggaggcaggcggggggggggggaggcggggggggcggtggagcgggggagatcccctccccaaccctggcaggtttaaaaaaaaaaaaagggaagaagtgaaaagacttttgcagacctccagagatgatgcataaggttggctggggtggagatggaaagatggaaaatctagattctgtttggagggtggcaagaactggattttctgatgaactggaaggcatgagaaacacaacacaaagattgtgacttgcaagatgttggcttgaataattgagagaaggtgggtgatgatatatgacatgtagatatgactatcattctcttttgacgactgaggaaggggaggtgagtcgtcctacttcacaaagatagtatatgggctccaggtgtgtctaacccaaaggttataatttttccacactcctatatccacacattaatttttttttttaaattgagacaagagtctcactctatcacccaggctggagtgcagtggcgccatcgtggctcactgcagcctccaactcctgggatccagcgatcctcccaccttggccacctaaagctggagttacaggcatgcaccatcacgccctgcctatcttaattttcataatgggtatgacatttactgatagtaatatcattatacatgccccatacatgctaacatctgcttccacatggaagcagcacaaagcctggaaccttcctcaaagaccccccccacccccgtacattggaacaaggtgctgggaacagaagtttagtaggtggtggaagggcagcggctgctaccctgggaactggttttaaaatcttacgttctgattgctgccgtggccatgtgctggtgtgtgatggggagatgttcttttaggtaactaaatccaacgagctgtgattggtgatcgaaccgagcaggcctcctctggatttggagagacatagtgcgtctgggcctgtgattggcgggattgctgtgattggtgaagtccctaaggctatctaagtttctgaacaccagttcctgcgttggccacgaggaggagcccaggaagcgcaaagcgcagcactgcggagagtcttggccgcctcctccgggacgccctccggcccagcgcggtgcctgccctgccctgcgccctggggcaaccgcgggatgaggtggggcggcaaagggtgtcagggctcccagctgcggcccgggtggccacgcttctctgcacagttcctttggcctcttcccctggctcccagccccacagaagacattggctgacccgaggggtggggctgcgggttcgcgaaggtttgtgaaggcccagatccaagttgcaaaactgtggmgtctatcaagtgagacttagcagccccactccctcaggtgcgccccttgccctcctcagagtccttctctcaagtttagcagcctccaccgtgccctttaagatcctcaaagaacttttgcaaagtggcatctcattggagctaaaatgacctgtgcaggcaaaggccactagctcaggggatcgtcctgcccatccccaggtgctatcacatcgcgctgtgcgtcttcactgcacttaaccactgtttgtaattgacttcgtttttcatgtatttacttgcttatgtctgcaacccgcctctccaccaaaacgcaagctctgtgagggagggtgtagggttgcccgacacaacacaggacacccagtttcatatgagtgtcagatgaacaccacagtttaaaagtataagcaggtcccatgcattatttgggacacgctcatactaacgaagtatttcttgtgtatcttaaattcacatttgactgggcatcctgtatttttatttgctcatctgcacccctctgagggggatattttgcccatggtcttccctgctgcatctccaccacccacaacgatgcacgcagaaggtgctgaataaatgttgactgtttcratggacgatttccatcctttattcactcagttattcatccagcctatttatatcaagtgggtcctgggaatacaatggtagatgggacacagtccagtggaggaggcacacaaccagtctaattaccatctgactaaacgatgatgatgtaaagctttgggggctatggggggacagaggaggaccccggcgttctgtttcccggaggaagatgactaagatgggacttggaggatgagaaggcaaagaaggaagtgcgacagctctctgcttgagaccacggggttctggaagctgcagggggctggggagggcaaatgtgcagtgtgggcgtggcagtcaggaaaaggtgagaaggagactcacattcactggatgttactacccaccagccagcacaagagggatgccatgttgctattattgtgcccatcatacagatgaggaagctgaggctcagagaagtgaaatgcctcggctaagtttacagtcgtggagggaaaagctgagcttcaagctcaggtctggcagactctgaagcctgcactcttctagaaaagccactgggttaaggattacaatgccaatagggggatggagaaacacgctcagaaaggtgatagggctctccctgtgaatatggctctgtccagttgagcagaatactgaagcaatgcaagagttatggttttttccaagccctccagagagacaacaggagggccagagcaggacccaggagtccagaccactgtgtctcccattcctattggggttggctctctaggagccccttgcagagccctggggctaattccttgcatggatcctggacaggtctgcagtttccatggagaccgcctcccaccatccctgaaatctcattgtgaccagtattaagggattaactctgcccagcggccctcgcagggtctggggtgctgagaggggccagcaggagctccctcaaggatgaagaggttgtgcactgtgcgggaccccatagcagcaggaggaggatgtcggactggggccagggctycccccaggacccaccaggtatggtcctgactccacatctgcctggaaggaaggatgggatggtaggagagagacacagaaccaagggggaggattccagactgggagcagtgtggaggatttgtaccctcatcccctaacccaggaacgtccatggccctgatgggtgaatgacgttccaatcagagaaggagaatccagacgacctcaacaaggtgagaggagccccgtagagtattaggggtagtccaaggctgcctaaagaccagatctcttatctctctcattttgcagttggggaaactgaggcacggagagggaaaatgacttgcccaaagccagtgagtcagcaaactgaagcaggtcaagaatccagagggaaccctgaagttccctgagcagaaaacratcggttaaaatctcattgccacttctgccttgaactccaaatcctccttcctgagctccaggcatggggtcccctccatcccctcacccagagcttgtctcatcggccatgcttccctccctgcctctcatcctcctcctgacttcccctgccacccgcaccacctgaggctggcagagagttcctggcaggttctccagtgctgacgggcacagccaccaggcccccactattccatccaggggacaccttcccactgggtccctatctggatgacttgggacattctttgttctacacttcatcctctctttgggatttctgagtccagacacagtgaggaccccgacagcccccctcctcacctcttgtcctgggaaggccaggcctgcrtggcagagatgtaaccagactccaaagctttctgggccgggcttcayggaaggccgtatcggtgcaggggcataaacacaagctctggagccaggtagagatagttctaacaccattgccttggctcactgggaaaatgatgtttcttctctgagcctcagtttcctcacctgtgatgggagacgagaacccttccatcctcaaagcttgctctcagctgctatggaagcatctccaggttgtgatattaaatgaaccaaacaagatacagaacagtgtaagagcagaggctactcatgtatgatcttacatgctatctggtctgtataaagaaaccttggcagatacatctgtaagggatgtggttccccatagtgaggaagtcaaggagaacaggtgaacaggagacagctggaagcaagacttctcaatttacaccttttatgttttgattctgaaccatgygaatgtagcaccaattcaaaactaaatgtaaagatgttcacaaattaagtaaaatattaaataataataataacacatacctcaataatatgaccggtgtgcagtcaagatttaggcccaggtactagaaattgactcaaagcaacagaggaggcctgtcttcaagtcaccgaatccttgacctagaaaggccctttattttgtcaacgtcaaattgcccataacaacaataatagtcttggtagcaagaatcaggagctccctacttggggaacatggtgccaagcactgtctgaacattatctcatttaattggcattttgattttgtgaggaaacgatcatcattccctctttacagatgggaaaactgagcctcgctgaggttttgactagtaagttgtagtaagtgatagaacttgatgccatcgaaggctttccaggttcaaatttgaagcccccctacagtgggtctcaatattggctgcacaaaaatatagacgcctggcacctccccacccctaccccaagattcgatcattgatctgtgatagggactgggcatctgtctttaattttaaaaaatctttttaaaaaatagacatagggtctcactatgttgcccaggctggtctcaaactcctggrttcaagtaracctcccatctcagcctcccaaagtgctaggattataggtgtaagccaccatgttcggccaacatctgtatattttaaaggtttcagatgattctatttcatcttcagagatgagtctctgctttgttagacaaaacttctccaatgggaaaccaaggccagggagggaaatgaccttgcccaaggacacacagtggctggaaccagagctggggcaggacacccagcagctyacatgaagccctagggcaaataagaaaaaggcaccccactctgggcaggcagagctccatgggcacttcgcttggcaagtggaacaagggctgggtttccatccctacctgccctcttggctggagaacctttgtgcagtgagcaacctgcacaactgtacagggcagtaactctgatctgagcctcaggacttccaaacacttcaccttagtgacctggcaaatccctggggcccctcagaacaagagtatggggagaccaagggtggcttctgggatgtgggctcagccctcactccccaaaccagagtctgggtcaggcaggggctcccatcagccttcaggccccacaagggccgggaaggccgcatctaattcccaaggtcacccctgcagataaattcaggaacataaacaggagggatgaacataaacaggaggacagcaacaccctcagcccagatgtcataagccacctggcaggaggcagcctgcggagaagctccacccacacagatccaagtcctcctggcttccttcctgatcattctccagaccatactctctgccctacctccggagccttacagtcagcatctcccacagtgccctgctctctgcccttctcctggccatctctcactggcatccctggaagggaagggtagccctggagttagaggcacagactctagagacagactgcccaagttccaattccacttcttgtttctcatcagctgtgtgagcatgggtatatggctcaacctccctgtgcctctggtgtgtaaaaaattggtgaaaacattgcctacctcccagagtggctgggaggatcaaggaagtaacacatgcaaagctcctaaaacagctgcatatccagtggccatgatgatcaatgtgtatattttgcttcatttcattttcatgacaaccctggaagttaagtattataattcccaatttacaggtgaagaaactgaggctcagagaggtggagagagtcagggcagggctctacatctttttttgtgatagggactgggcatctgtctttaattttaaaaaatctttttaaaaaatagacacagggtctcactatgttgcccaggctggtctcaaactcttgggctcaagtaatcctcccatctcagcctcccaaagtgctgatgcctccagagacaggacgtggctgagatggattataacgtagtctccggtttgcagtgcctggctgctggtcatatcctcacagggcccatgggacacagagccaggtgcattcccctgacttgggtcttccaatggctctcaggcacctctctgcttccagccagccckgggaggagggggagaacggcatggcaaggcgtttgcagagccgtcttgttcaccaatgtctttcaagacattgccygggtccacagagagcccaccattcattcccatgctggctggagcccctgaatacccgaggtgaccttctgtccttggacaagtcacttccccctctgatctccatctccccatctgtgcaatgaggggatggggctgaatcagtggttttccaaccctcaaataaaatattaagactacatgtaaaagggagtcgctggttgaagctgggcctgtggatgcatacccttggctcctgggagcctcggaacccagcttgaaaaaccccagcccacatcctcctaaagattctcctggctctgacactgcagagttctagaaccccaagctcaaagctgccgcttcccatccctgtttggaaagctctcccccagctgcctttatctctctttggtaacagagcaaatttgctcaggacccagcacagggggaacaagcagactgttgactcttgagcaaagcctcttctttggagagcagccgaggtggccgtgggctatgcgttgggaggccagcggcctcttgcataaccctggaggcctcctgcccacccaggccttttcagggttaggggtgaggaaaaccgcaaactcatgcccagttaattttttaaggcaaaatcaacaggctcagcaatgattagcagctgggtaagttggtcttaatcaggctaaggacagggagggaggaaggaggcccagggatggggcccagttatcagttaaccacatgaatgttgcttccttccaaacccactggccttcagccccaagctccctcatcttcctctcggaaatactcctgtgacaagccagtggccacccatcatcgggtgaacaagccagtggccacccatcatcgggtgaacaaacacaatgccactcatggtctgtgatgaagtagaaagtgctcgttgttaagacaaagctcacccaccaccgctgcgtggacttgagcaagtccctttcrccctctgaggctccgtgaggggccccaggtctgggccccaagtctatggttcagtctgtggccagctgccactcccctgacggsctcagtgtttccgtccactaaatgggtgggttagccaaggcatcttttccagtcttgaagctttgtgggtgcctgatttgatyaagccacagtggcctttgccgagtgcagagggtggtatgaktggcattttaggagctcaaggaagagaaagggaggggacctacctggtatctgccgttggtatcagcaagtgtcagatcccagctccaggaagagggctgtcctctcagatgggaggcaggggtccagtggggtggctgtggctgcagggacagcctagcagagcctcttggtggcccagaccccctgtccctggaccttggaagccgctaaaggaagcagcaagaccaggccagctggtggctgcctggactggagtttggtcagtggttggggacctatattgtgagatagttaggactttgtccacaaactggaatttgaaatttcaaaggggcaaaactgaagggccctaccccagagtagagatggctcttggcttctttcctccacgacttttgttctttgtcttgataagtcccagttttctctgcacctctcccggagtggtgggtggggaagaaaagataggagataatggtgtggtgagcgccaaggggaagtgaagatgccaagcagccctggggtggccaggcgtgtggaggatgcccctgcccctgcctataccccgggataaggtgctttacttctcaggtccttgagttcccctgcaagactgaggcagtgaaaccaccagctccagtgccttagaattccgaagtcctttcagggattccaggagtcatgatgcaggcaatgcgtagaggggtgaagccctcaagctctggaggcagactcgggttcaaacaacagcccctcccttacgagctgtgtggctttgggcaagtcacttcacctctctgagcctcaatttcatcatctttaaaatggggatgacaatagcccctatctcaacaggcagataatatgagaaggctagaaggtttttagcaccagggctagcacaaaatttctctgtaaacattagaccttattataatgtaaaagagaaacaatgtggttcgtagtggcagctcccttaccaccgtccacagcagaggcacaagctccctacacatgcctccccaactgcaggttgcccagggcaatcccttcccgtctcaactgggtctctctgtgggctctgaggtcctctgctatcccctggaatctgctgcctcttgagctggggcccgacagcaagtgagcagaggtaaagaacagctgctaaattgatggcattgaggctagtgcttgttcatggctgggtgtgtggtacctggagctgtcctgagcaggggtcctgattccaactgattatgtggccagtgtgtcatgcaatcaatgaccaatgacagtgattgctactattgtactgtatgcctacacgtggtcatttaatgcttgaaccatccctacaaagaaggtatcaacccaatttttctgatgcttaaactaaggctgagaaaagtagaagttgaggtcacagagtttggtacattggcactgcctggattttaacctagatctatctgacccacaaggtctgtggtttattcccctaaagagaggtcaggggaagagaggctaagaagcttatctactctctcatttaaycttcacgacaaacgacaagttagaccccttgtacagaaggagtaaccaaggcttcgaaataaaaacttgccttgtgcagacagctggccctgggcttggaatataaatagtcactggtatacaggcaccagagaccaatacccacaggctaacacccactcagtccacagaaagaagcytaatattttttataagcatagaaataaaaaccaaaccaatactgtgacatttgctctgtgacttcctgtatttattatgtgctcatatgaaagcacctaagcattgtcaggataatgttcttcctcactggagggcgttatgaagttgctttcttttttccactagttaaaaaaaaaatcccttggaggaagggaatgaaactttttataattgatacataataattgtacatatatatggagcacatgtattttgatacatgcataccatgcaaagtatttaggatatccatcacctcaaacatttatcatttctttgtgttgggtacatttcagatcttctcttctggctattttgaaatataaagtaaatgattgttaactataatcgctctactgtgctataagaactagatcttattccttctatctcacttatttttgtacccatgaaccaacgtctcttcatcccctgaagaaaacattctttttttttttttagacagagtcttgctctgtcacccaggtgcagtggaacaatctcggctcactgcagcttccacctcccaggttcaagtgattctcctgcctcagcctcccaagtagcctggactgcaggggcatgccaccatgcctagctaatttttgatttttgtatttttagtagagacagggtttctccatgttggccaggctggtcttgaactcctgacctcaggtgatctgcctgcctcggcctcccaagatgctaggattacaggtgtgagcccctgtgcctggcctgaaactttcaaggtctcaagacactgtacatttaaagtaccccaatgtyttccttttccacytcccgttctttctccttatctaacatgaagaacattgtattaaatctgatttttaaggagtttttgtctgttatgtgttaagggtttgtttggtaccccaatgaaaacattctgcattgcagaccaaagtgtgcttatttcaggggcatgggatcattgcgttcttagccattgtcacaaaatacatggagtcatatttaaaatgtaaagttgtaacatacatatgtttaaaatggaaatacaaagcaaaaagatggatgtacaatgtcatgtgtattcagttctctgtacttagtaaatgtaacaaactttctgtctattactgaactataggtgcaaggacacgtctccagttactttgcatctgtaatccacaaagattctgggcagctgtattatcatagcttggtttaaataaactatgtagtaacaatgaacaacaagaacaaaagaaataatagcttgcctgaggtcacagagccagcagatcttataggtggtgcgtcatttatatgaggaatgtgtatctaggagatactgtttggcgttggctaagggtggaatgaatcatgtatgtaatagattatgcaatttacagtgatgagtggatagatttacttatggggtaggttataatgtggtgggatgtgaatctagaatgtgcctcctaggcagtcatgcagattgtgcatttggtaagtcaggtatgtcatgattcatgtatctaatagctcttcatttgcagtgtccacctagtagctcttggatataacgggtcatggctgtggcatggtgtggttgatcttggttgatcgtagaccttatttaattgaatctaagatgtcatctatggaaaaatgcattgttatttttgttgccartgaaattctgacatgacattgatcacattccccgttaagcaatgtggaactgtgcctcagagtggaagaggccatgtattcctggattgtgtggggagtagctgtgcctgtggcctgccataggtgccaggcaggtggcagaggcctgggctcagcccttggaggctcctcccggagctgccctccacatctcttctgtgtttaccccttggtcggatcttctgtttcttcccacctctgcactgcccccaaggccggtggagccaggtcagatactcctgaggtaggcatgggaggaacccgccggtatttggtctctttcagccccttatcaagtctcatagtgtgggttgcagggggctgcctcttgctccctccctcagagtcttgtcctggctaacagaaaactgagccaggatcatctttctattttacagagggagaaattgaagccctgagaagagacgatgtaaataaagttatcggaatagtgactgagctagttcctaaccccaggtctcctgacrtcaaatctagcctctcttgtcctccacaacagttgctccctctcccctttccctacaggcaatagcactccccagtcatctcagcttcagaggtcagatcaagtggacagaataaagctaagcagggcagagaaagggcttctagcagtggaaagaacatgaagatgcctcctcataccactcgaacacacatgccctgactcccgatttgctcactcattaatccacccacacattcactcattcactcactcattaattcacccacccattcactcattaattcacccacccatttgctcacttactcagtaatttaccctcattcgttcattcactcactcattcatgcrttcactcaactcactcattaattctccctgtctctaattcactcactcctaattcacccactcatcaattcccccacacactcactcattaattggtgctcccactaattcgcccactcttgctcacaggtgtcaccgaggccctccaacctgcccttccagccagcagtggaggacaggctcccaggcctcccaagtctcaggcttttcttcctctgccctcactctctgccttctacatcaagactttacttccccagattgattggcagcccttgaaaatgtctgcacagaaggcaatgagggctggagggagtgagaagaacagagtgcaccatgagcttcagacagccaggaccagctgtgtaattttcagggccccgtccaaaacaaaaatgcacaatcccttgttcaaaagtcatgatgaattttaggacaaccacagcagagcactgaaccaggaaccaggactttctaagggttgggttgcctgtgactgcactggcgatacccccacaaagcccactctgaaggtaggagacgggtggagagaaacagggggatggcaagggggatacgaaacagggagagggaggagggggaagaggatggacgtctaccaggccccacttggtgcttgatttatgccatctcatttccttctcaaaccaccctttgaagttgattgtacattttacagaaaaggaaactgaggctcgkagaggagaatcatttacccaaggtcccagttagtagacrgtaggtgcctgaatgtaaatccaggtctctgcctgctccgggagggggtgggggtgagggaaacaggagaatgtgatgggaaaatccgagatggagccagcctgggccagaaacactgggagctgtgggagacggmgaggggcagggtgggatcacagggagcaggagcggggaattggaggtgaatctggccctcccaaacttccagtccattctgctcccaggggaaccgggaaactgcgggggaactggaagggagctcccagaacaaggatccagaagattggcatctggggcctgggatttaggtttctaaatcgtgggccatggggcagccttatctctgcaaaagcattgagggtagaagtcaatgatttgggaagttattgaattaggggatctcggaggtaggctgtcagtgcctgatagtatcagttagaatgcctgacttggggtgacaatggcttggaggggtgggtgagtcaagggtcaaatgagtgcccgtgagtcatgatgcctgccttgtacaattgataactgaacatcggtgagttagggccccagcagttgtaattagcaccccgggtgtcagccagaaaccaacaaacagccaaatccctgcagccccgcccagcctatccaccggcgggggaccgattaaccattaacccccacccctccccggcagagcctccaccccttcacagaggctaggccaagactcccagcagatcttcccagaggacggtttgaaaggaaggcagagagggcactgggaggaggcagtgggagggcggagggcgggggccttcggggtgggcgcccagggtagggcaggtggccgcsgcgtggaggcagggagaatgcgactctccaaaaccctcgtcgacatggacatggccgactacagtgctgcactggacccagcctacaccaccctggaatttgagaatgtgcaggtgttgacgatgggcaatggtaggtgggggcagatgtgcccaggtgtgccagtgggggcaggtgtgcctgggtccaggagcagatctttggcactcaactttggggtgggaggagaatgatacaaaatggtaggttggtcctacaggccagcacaggtgttgccaagtgaagcccatgtgcccaggcacagtgatcacaggcattctgggtgaagggaggcctgcaagggccaatttccagcaaaagtcgatcccggctattcctcccaggcccttccagtcctcactgcctcacagtggctctgcttggcgcttggcacagtgacrtgatggtgagctcccccttggtgcccagctccagcgattcagcccagcwcggccccttcgtgaaccccttgggcctaggttcagagagacggcaagggatgttgtatccctggagatggtggttggagacataaccgcatttctcggtgtctttgggactttcctagggaaatgaaattggcacttagggaaaatggagctctcagggaagttttgctaactacgaagccaactcagcactgtgtgtgttgtgtgtgcgttcgtgtgtgatagtgagtttccatgtaggttgtatgggtggggtgatgccttcaggaacccatttgcatatgtgtgttcatttgtctctgtgtgtgagttctgggtctattttcctttgtattcattgagtgggtctgtgtttgtgtcttaggagttgcccgtgttgatcytgcttatgtatgtaagtgtgtatgtgtgtgtacttgtgtctgtggatgtttgtacatgtgtgctgtgtgtgcgggtcatagagcacatgygtttgtgcatgcggacctgttggagtgccctgttcttcctgcatctttatcctgtatgggcgttttgtcgtgtgcccatatttgtacctgctgtgtatatatgcagttccctgtgctgcgggcgggggtcagcggtctctggtgtgcacgactgcacagacccaaatgcaggactctgttgttgccactcaccaagtgagattcatatcagcaacatgtccgtttgtctctgagcagattttgttgccgctgcgtctcgccagattgaggcatcccctccgacatcactggagcatatctggaggggtggacagttctccacagggaggtaggggaaaagaggaggcccggaaacccctcctggagggaagagccccatcggtcccaggccmgcctcagaggagagggggcaggcagctggctgaggtcagcctgccaccctgcttccttctgtgtcttggagccactcagccagtatgaggctgcagctccagctgaggtctggaatcttgtggtcagctcagctagggtgaggaggcagctgctgggcactgcttgttgtcagctcagcaggtgctcacctgcccctgccgtccagtcacgtgtgaccttgggcatgtcacctcccctatcctggcttctgtatcttctacaaaacaggcttcattcccccaggcctgctggctggacggcttttaggcctgtctgaggaccacgccaggagcgcaaggcaaaaacacaccagagatagcaaacaagctgctgctgcactaggtggagtgttgtgtggccccacgaggaccactgccctgccctgggctgctccccgcccccatcactttttccaagcccaggaactgtgtgctcctgaggcagaggccaagcccctgaactgggaktcccaaagacaagaccacctccagctcykgaaccagaaagatctgggctcaaatccggcatagatccttccaacctgtgtgaatgtggcaaggcaatttcctctctgagcctcagtttcctcacctataaaatgggaataaataatagtgtctgtctcccagggctggccagaggataaataagatgaggtgcctgggtgcttagccctggtaaagggcctggccccaccatgggtcatctcaagggctctgagcatctgtaagcagggtccccacattcctcactggagtttgaagtggtctgaattggggttatgtgaagttgtcctctgaagtgttttgagtacatcctgggctggtgtctgaaaggctccaaggatatttctcccccgtcctctccccaccccaatggagcagcagccctgggtggctccttgttcattagaggcccagcagacacctcaacatgtgtggcactggctggagtagcccagcaagcctggaccataaacccatggctctgcttcacsggaagcagtgcgatgacaccaggaagccacttttcctctctaagcctcagtgtcctcatctgtggaatagaggtgctcggctgacctcagaggggagatgatagagctgacagcccccagcccatcctgcctcagaggtgggagctacttccccagcctcctgctgaatggccaggagctgtgggggtcagctctccccgggggtcgggggaggagaggccgagggagaaagggcacccacgtggcttaacaattatccccatctccaggaataattcaccaagtggagggggctgcactcctggggacacctgggagtctgcgatggcagaaatgagatgcggcagtgtctgcttgtgcaaggagcctggaagtcctctgctccgagagttttcctatgtggaaaagtttttatttcatgaacactgatatagtgcttactatgtgccaagcacttcacatacacatatgagaattcaccgaatccccataacgaacctaggggaatatcacgttccccattttacaagtgaggaaacaaaagcatagagaagtaaacgaacacagtcaatgtcacacggctaaaaagtgggcaagctggaattgaaccctgggcagaaggacttcagaggctgtgctgttacctacagtgcatggccctctctgggtcttaactggatgcccctgaggaatccaaggttggattcaggatttctatgaatacacgtgtgtgtgtgtgtgtctgtgtatgtgtgtatgtttgtgcatgtgagcatgtgtgtgtggactgtgtgtatgtgtatgtatatgtgtggactgtatgtgtgcacacatttgtatatgtgtgtgttgatgtgtttgtatgtatgcatgtgtgtggactatgtgcaagtgtgtgcaatgtatgtggactgtgtgcatgtgtggactgtgtgtatgtgtgtgcatgtgtgtggagcgtgtgtgtgcttatgtgtggactctgtgttcatgtgtgtgtactgtatgtgtacacatgtgtgtatatatgtgtgtgtgtgcgtgtgtctgtgtggtgtgtggactgtgtggtgtgtgtgaactgtggtgtgtgtgtgcgtgactgtgtggtgtgtgtgcgcgtgtgtgtgactgcttggtgtgtgtggactgtggtgtgtgtggtgtgtgtgtgcttgtgtgtggtgtgtgtgcgtgtgtgtggactgtgtggtgtgtgtggactgtggtgtgtaaggtgtgtgtgtgcttgtgtgtggtgtgtgcgtgtgtgtggactgtgtggtgcgtgtgtgtgcttgtgtgtggactgtgtggtgcgtgtgtgtggactgtgtggtgcgtgtgtgtgcttgtgcgtagcgtgtgtgcgtgtgtgtggactgtgtggcacacacgcttgcattttcccgggggctgacccattgcatttgtcatcttcttcaaaggggtctatctttgctgaaagatttgctgacaaataaagggggttcagctgctgctatttttttaaatttggaaacaaattttttaaattttttaaattttttaaatttggaaacagaccagtcaaactgctgccttttatggttagagaaaatgaggcccagaagaaattgaagcagggaaarcgaagttgcccaagtttacaggcgagttagtggcagcatcagcagtagtgcccaggactcctrgcacccagcccaagatcctctttccacctgcctctacggcccccctcacatttgtgtagatgcagtagcttttgcctgtgggatgggagggwtgggagatgtgtccagaccctcctaggaggccacatgagtgtgactgttctcggcccaagtctttctcgttcctcagagaatttgcggggcccctgggcacacaagctgagatccacccagccctggtcccttggcaagaactgagggacaggacctggttctggggaaaatgcaggggaatgtttctcccttccacagcccccttgcgagttaggaggccggctcccaccccagaaggtggccaggttttcatgccttcctagagaaagctggggctcgtggcctccaccacaggragaygcagaccctcagaaacaagtctgtgaagtcacaaccagccscagtttacagatgtgaaactgaagctccaaaaagtcaggaggtcactgagtggggaggtgatggagtgggaacagcccccagatctggctgaggccgaagccctggagagatccccgcaaggctcccttagatgcctgacattctgytcttcctgaagcctcactcccttctctcctggygcagacacgtccccatcagaaggcaccaacctcaacgcgcccaacagcctgggtgtcagcgccctgtgtgccatctgcggggaccgggcyacgggcaaacactacggtgcctcgagctgtgacggctgcaagggcttcttccggaggagcgtgcggaagaaccacatgtactcctgcaggtgaggagcctcaatttcttcagctgggaaatgggcacacttgggctcatggccccaaggtctgtcttctccctgagtgggtaggtcccagagacagctgcccttcagggccttcaaggctcttctggttttgtaaaagactttgtgaatccaagaagagcatctattctaggaaccacatttactgatcatcaagctactggctgccgtttattgagctcttatcatatgccaggcacaatactaagtctttgtgtgtatttacycatccccttgagcccattgttstttttcccattccatggggcctctcctgaagcctcagtagatgagcccgtcttccagtctggtgctgtttttgggacaaataggagattgaccccaggccgttccacctaccccaggggcttccaccaaccccaaagtcttcccaaggccttggagagccctctttcgaaagcatctcctgttctgggtaatgacaataataaaatcatagcagctgtcaattgcgagcacttgtcatgtacaaagactgtgccccatcggcgcatgacttcatttcacctgtcaacacccctgtgagatggttactgttgttattcccattttatagaggaggaagctgtggcttggagggctaggcatttgcccaaggtcaaccagcttgaatcactggcagagccagggttaacattcagggccccacccatcaccacggtgtggcactgcctctacttcctatccccctccagagagaggcttatgtgaaccgagtattaactctgagccataaccaggagcctgctatgggttctgagcttttataggatgtggtggaaatagcagggctctggtactccagaggtcraggttcccaactcagctctaacaccaaccagcagagygacccaggaccacatgttgcctctctgagcctcagttttcccatgtttagcaggacaggactgggctcttagagagttcatagcacctttccagctcctggtgggttcaagagagaactcccgggatgaagagatgagagcactgaggttggggggtcaactggatagccagggccctagttctgtcctaagaggaggaagttgtgtcttctccatccaaccatccaaagccctccccagatttagccggcagtgcgtggtggacaaagacaagaggaaccagtgccgctactgcaggctcaagaaatgcttccgggctggcatgaagaaggaaggtgagcctcggccctccccgccccaccaccactgccccacctgcacccacagctccccgacagtcatttacaactgtagccacactttatgactcagtggcaggccccagggtgactggctaatggctgagaagagggagggcctggaaatctgaccatagggagcggctgggcttggtcttgagaaagattcagagagataagctcccactcttggctcctcaggctcccagcaaccaccacccctgcctgcctgtctgcgccaccacaaagcagccacgttgtgtgtgtgtgtgtgtgtgtgtgtgtgtgtgtgtttaatataatatttcgaacgttaggacaagcatagagaatgatattgcaaacatctgagtactcactatcccaactttacaaaagggacagccagaggagcccgatgcctgagcttccggtcccagggacaaatgccccagttcccttagtattcattcgtgggtatcacgtgatctccaaagtcttcacattctagaaaatgggaacaagaccccrgacccatcctggacaaaggaggagaagaccagagcacaacakttattaaggtcttgccaggcttcctgctaccagcaggtatcagtcactgggctgtgctttttccacacttcagtaggttgggttcatttcattttcatgacaaccctatatgggaaaatgttgtgaaaatgaaatgagcccagcccattgaacctattacaattcctccctttttgtggatgaaggaactgaggcccacaatggttaagcaacttgcctagggccccacaactgatccttggaagatctgaagtcccagagcttctgctatttggaccacacttcagcactgtctattattttatgctctccagataccagggacatttaaaattgttttcagcccaagcaagggaagcaaaaatcttttaactgctttaaagtaacttgaggccaggcgcagtgaatcaggcctgtaatcccagcactttgggaggccgaggcaggcaaatcatttgaggtcaagagttcgagaccatcctgaccaacatggtaaaaccccgtctctactaaaaatacaaaaaaattagctgggcgtggtggtgcatgcctgtagtcctagctactcggaaggctgaggcaggagaattgcttgaacccaagaggaggcggttgcagtgagctgagatcatgccactgcactccagactgggcaagacagcgagactctctcwmaaaaaataaaaaagtaacgagttcattttcgaatctcttcatttcctgctcctctaaactcaacctttcccagctctgcgactagtcccagaccttcccttctagcccacagttgtgccgtaccagccaaaccttggtctagtcctgctagttcggtacaaacacccctcacccccatcaccccagcacaccccagaagcaggaacgtaggacccagcttgctccagggcccactgagaaggaggggaggggaggctttggtagactctctttcccctgtatctgctcctggccccctgttttctctgccccctcccttggaaatatcttctatgtctcatccttatgggaccttagtctgggctcatgagctgtcttggaaaatctgggcttgctgatcccgatgcaggagtgggtggtccccaaggcctgctctgaacgctgcaattctaacatctagatatcagtggttctccaagggcaagaggggctttttaagctgcaaatactccctcctctcccaaacccagttttcaatggggttaagcctgtctcatccacttcaacttccattttgtggactgggaaagattatgaatgggaacctgatgcatgtgygaacagttggaggcaagaaaaagattgagaactacagtctaaggttccaacatttctgtggttgtattagtcagtgattccattatcccaaaagcctaagattttaggcactatgattcctcataggtgtcatccagagggcactgtgtttgagagaacagctctctcacagtgaaagttcaggtctgtgacaggcagatgggagaggggttggcagccctcctgagtggatggctacccacctccactgcgtgtggcctggtcctgcgtgtggtcagttgttataaatgtcttttattagacatccagagtcattttcacttgtgtaatttagggacatttctgtctcttctgggctctagttttcccatctataaaatgaggacattggataatgaacccttcagccctatgagtctcgctcctcactccctgacctacctgcacaagtcacactgcccactaggatgggtgtgtttgttccctggtcccttctttttttttttttttagatggaatttcgctcttgttgcccaggctggagtgcaatggcagtatctcggctcactgcaamctccacctcctgggtgtgagtgattctcctgcctcagcctcccaagtagctgggattacaggcatgtgycaccacacctggctaattttgtatttttagtagagacagggtttcaccatattggccaggctggtctggaaccccygacctcaggtgatcygcctcggcctcccaaagtgctgggattataggcatgagccactgcgccyggcccctggccctytcttgagctgctgcaaagccagcaaaccccttactaggctcctggaagggggatgagagccccagaccattcagccttagctcagccttgaaaatagctgcttgcttcctggcccagggaaacggacatgctgcccggaggataggagagttggctgatggmgagtgagcgtgggttagtcgatgctagtgtttgtttacatgcctgggttacctggaagatcatgacacatgcagtcacttggttgttttgagaacrggccagagtgacaaagtgttcagttgccactgtggtcaagccataggaaatgagggtattcctagctgtgcctgtcttctaggccccaccacccctcctcagcctgctgggaagctcccaaagccaaaagaaagtctcggtggaagtctcactggccaggagagttgggacaagtttttatttctttttcttgatgaccttaggagaatttgaggactgaaaycctaaaatagtccctgagaaccagaaagtgtgagctggaaaggtaggatttcaagaccagctgagtctataagaggtcatcaaatctacctgctccccactttacagaagargacactgaggctagagaggtgatgtgacgggtcaggggtggagtcaggtctagaactcaggctccccagagctgagcagacaccaagctccctggagtgaaacttgcagtgatcagcttgggaggcacatttcttgatctagatggctgaaactttctctcgaccacagagaggggcttcaggtctcatgggcctataagtctctgccacaggatagtccaccatggctggaaggggctccctggaaggccaaagaatccagggagaaccctgggggtcagtgggccaacagcaggtcaagaattctttcctgcaaccgaaagccagggagacagacacctgccttggcctaagctgtcaggcccaggacaaatattcggctcctggcatcaaaaacccagcccagaaagcggacccagagttgcaggaggtgagcgtaggtgatgggccaggggccatctgaagaggccttcctcggaagcccctgccctgctccccacagccccctacccaggagttccctgggaagacaggctcatcacctctccgcctctgcccaggtcggttaatattcaatagaagttacattaggtccccgaccctgctaatactgagcaaacatttggaaaacatcattccgtgactgagctcgcgccgggcactgataacgcccgcctaaccttgaggagccctatccgcagctgctgacagcagccctttcattccgcccgccggccactcggcgccctgatgggtgggtgygggtgctggcaggaggctgccgtgggaggggtgtgggcgggtggggtggacggcccggtcagggaagccgtgctctgagctggccccgtccacatggtggtctgagaggaggttgcttgcctctggacttctgttctatccactgactcccgggctcaagtgcaaaggatttgacttttattctctgattttaacaatgtgtcaacatcaagagaaagttgaatagctggggtgtcaatgttccctggagaaatagggttcttataagaattagagtttatgaccaggtgtggtgcctcgcacctgtaatcccagcattttgtgaggctgagtggatcacttaaagccaggttttcgagaccagcctgggcaacctaatgagaccccgtctctcaaaaaaaaaaaaaaatttagccaggcgtggtggcacacgcctataatcccagctattcgggaggctgaggcaggaggatcgcttgagcccaggaggttgaggctgcagtgagctatgattgcaccactgcagtccagcctgggcaacaaaatgagaccccatctcgaaaaaaaaaaagaaaaagaattagagcttgtctcttccaatgccttcgttctctcactgcacaaatattcattgagtacctactgtgaaccaggccctgttctggtggctgggactacagcagtgaactagagggatggagttttggccttctgaagctttccttctcagagagagacagatagtaaaggaagtaacaaataattctacaataagtgacttgaagaaaaataaagcatggggggcagggccagggtgggagtcatgttgtgttagacagggtggctggagagggtgtctgaaaggcgacatttgtgcagaggcaggagtgaaatgaagatgctgctgcgctgtgcaggaaagggaaccccaggcagtgaccacagcagcctacaagcgtgcggatgcgtccaggtggggaggcgggttttcgcggacagagtgtgtagggggaagccggtaaaaggtgcgatccgagaggagaggaagggccctggggacttgtgaggttggaaggcactggttttgagcagcaggsgacatgacttgaacggatccctctgtctctgagaggaacacagactgcaggcgcaaggcagaagcagagcccaggaggaggctgatctaatccaggagagacagcrggcctgggagcagggagggagcagcaggtctgtttgtcaggatcacgacagcactggggtgtgaggggaagccaaggaaggtggccaggcttgatgccagtccctgagacgagaaagagtgcagggagccggctggcagggaaatgcctacgggtagggaaactgagccccagagagaggctgcgattgccaccggcacacagagtggcaggttccagacaggaagccgggtctggtgcagcttcaacctycctcctttcygaatcagccaagcctcattccacagtgaggcctcttggactccaagggctatcccatccactgtcgggatggtggaaggatcatcttctatctcaggccaggactgacccagatgggagcaggcagtggarcctggggccccggtgggcgtaggctccagatccctcagtgcctggaacagagcagcagtgggagggagggagacagcrcctggccttgctgatgctgaggttagtctggagtacatgcagctcctgctgatggacaaaaccatcaaggcagttggagcccccagatcctcttgttcaggaatccccaggccatctccttgtcacccagagtaatttgttttgcttgctttactcactttcatttggaaagaaagggacccttttgtagaccagagcttgaacatctttaagctagtcagatcccctcctcaatgctcaagaccaattttaaacccatagccgagtcttcactgtcttgcgcgcccctgctgatgggtggatcactcttatagcctctscattgtgttgggggcagttgtgatatgtggaaagttcttccaccagctgagttagaggccatctcccctcattccacatgctgatgtgggcctgttctctggacaccccccacctcctgctcccactcctcatcagtcacagacacccccaccccctactccatccctgttctccctcctcacctctctgtgcctcctcacagccgtccagaatgagcgggaccggatcagcaytcgaaggtcaagctatgaggacagcagcctgccctccatcaatgcgctcctgcaggcggaggtcctgtccyracaggtaccggggtgatcctgccacccacccagggatcccccacactacagaggagctcacctcctccacctccattctccccagccaggccctggagcagctgacgggaggggcctcagatattacagaagggacactgagtscggtttcacatggcccagtttgcagcaagggcaggaatcgaacctggcgccctggggcactttctaattcatcctactgcctgcatcccacaggccaagcagagtcttcaccttcactgagggcctgcgatcagctcagctccgagagaacagagcagtggctcagtggagagaggtggcaaagtggggcccagcccttcccttgctgagtgaccttgggcaagtcacagcacctctctgagccatggttgcctcattgtcagaaaaggatgatgattttttgccctgcttctcctctaaggctgacagactccttggggctctaaagctgacagaggagggggcagggggcaggtaacaggtgaaggcmcagagggagcccttctccctcatccctgcctcctccctccctccgtttttaccctgagcttccttcagagctggagggcacccactatccagccccctccscacatctgattccagggagggggctctgtgcaggggacagagartgcgggagggcccggacatctccagcattttcttccctgkatctctcgaagatcacctcccccgtctccgggatcaacggcgacattcgggcgaagaagattgccagcatcgcagatgtgtgtgagtccatgaaggagcagctgctggttctcgttgagtgggccaagtacatcccrgctttctgcgagctccccctggacgaccaggtgaggatgggcgtggatggtgggcagtagtgggcagtgggcggggcagccagggggctgctggcccacctgggatatagccgtggactggcttgattttattttatttaacaaaatatgtagtgcacacacgtgtctgaaactttaaatcaccttacaaatattaactcagttagctcctccaacaactctatgaggtaggtactaaggtactattattactgccatctcataggtgaggagattggggcacagagaggttaagtaacctgctcaaggtcacatagctactatccagcatagctgggattagaacctggcaggaagctccaaagtccaagctcctgaccattgtacctgaggctctcccagggggatgttgacagggaccctaggacagggatcaggagattttggcttaagctatggctctaagactggttgtctgcctaatcctgggcaaatgagttcctctctctgagcctcagtgttctcttatctgtaaagtggaaatgataatatccactttagagtgtggttgggaggattgaggacattggtgtctgaaaagtacaaaaatcaggtgatggggcaagctgcacagtggccagaccagagctggtctccctaaacattagtttcttccttgtttcccaccaaaacgattgaactcagcatcgtgtttcccaccaaaacaattgaactgagcatcatatttcccaccgtacatttttttggaatactgaaatgtccctagggggaagaaagggttgaaggaaggtggcgtgtgtctgaggacagatgaatttcggagatgccacctatgaagctcctgcccagagcacccctgggcctccaaagagatgttacccatctggggaagaggagctgggctgggccacctyctcagcttcggagacagactctggtgcattcgcttacccgtttcgcacctttgcataagacactgacaatgcatgtgagtctgtgaaagcttctgagaagtctcgtccaggcagttgtttgactttgcagaggccgaggcttctcaaactccttyggcaagattctcctggaacacctattaatactgcacattgggacactgtgaaaacgctggtttggcttgtccccagcctcatacaggggctggacccggggccctcttccatggttcctccttccattagcagagtcgacagggcaaggatcttggacaatccgcccctaccctctcccctgttccttgtgctctggccccagtcccctctgctggagtctctacattaatgtttaatccctcctgttccttcccaggggcttagcagggcaacaagatacccccaacctgagcaattgttaacctcgatttcccacccaaacctccctggctggggctcagagcattctcagagagcaatgatgggtggccaataacacaggacaatcattaacacaccaccccgacctcccggcccaccccccagaacagctgccatatcagggggttgaacctgggatcagaagggttcccagctccccattcctggtatatgaggagcccagcttgcccaatgcaggtggggcatccctgggaaagtcgggggcattgtcctccaaagggcttcccaattttgttgacattgccccagaaactagattcccagttggtgtgcttcttgggcctggatacaattgcagaaagagattggggcttagagagagacagaaatttgcctgaagtcacagagcaagttagcracagaactgggattcaaatccaggtcttccgcttcgcgatgtgaaggccactggagtgactgatgaaagacttgcacagtgcccagtgcgcaggaggcgcttggcaatcagcatcctcggcctccctccatactggtcatggaaagtggattttccctcccaggcagtttcctctttttctgttttcctcacaggtttctatccatggggaatagaaggggcaaggacaagtggctgcccaggagcagctagagctagagaggaagtcaagatgtttgctcattcattcattcatttcccctttccttccttcattcaaatatttattgaaggcttattttgtgccaaatatcttcagacaaatgccttctttcctctaacaacaatttcacctccttagaggccttctctgacctccccatctaacgtagccattcttgccccattgctctcaccatcctttccactcccctccctccctccttcccttcctcccaccttttctccttccttctttcctttatgctgtgatcaccctgtgtcctctgtacttatttgttctctactatctgttcatcctctctcctataaatgttagttcgatgagattagagaccttgtctctcgtttttaaacattgtgcctccattgtcttaaaaagtgtctggcatttagtaggcatttaggatttgataactgaaagaatgaacaatcaaattaatgaacaaacaaaggcattttaaccttctagtttggcttgctatggaacctccaaactccctaacccaaccttgaagatgagaagatgagatccttgaggctaccagcctggtgctgttttgtttcaagccatcctttggtcctcaggcaagcactaaagcagatggctctcagtgggctggctatgtccttctgtgagcttgctgggcccctacctatgactccagtcttagaagtcttgccttgtaccccctgcagagaakggtttcatcaagctgattctctgccaggggccagtgctcatacatttgctctgagaaggaccagccctgagacctaacatccacatccaagttcttgtaatgccctctcagaatcctggagtcctgcaatgtcgatccctggagggatctgccagaccaatgatttcccaaacagaattgcacttcagagtcaactatggagctttttaaacacagatccctgggcccaccctaaacatacaaaatcaggatcagaatctcagggcctaagaatctgtattttcaggccgggcgcagtggttcacacctgtaatctcagcactttgggaggctgagttgggctgatcacctgaggtcaggagttcgagatcagcctggcaatatggtgaaaccccgtctctactaaaaataaaattagccaggcatggtggtgcacgcctgtagtctcagctactctggaggctgaggcacgagaatcacttgaacctgggaggcggaagctgcagtgagccgagatcatgccactgcactccagcctgggtgacagagtgagactctgtctcaaaaaaaaaaaaaaaaatagaatctgtatttttacaaagcacccttcataattctccatagctggtccatgggtgggaatttgggacccacagttttggaactttttgggatcatagacctttttgagaatctcaaaaaagaaaaaaaaagcacacagaatgttgcttacagtttcatcaggcacacagaagaggcccagcacgaagcagtttcttgcccaaggacacagcagttcaaggacagagtcagcgcgaggtctctcagctctgagcacatgttctttccccttccaggtttctagttttatgggtagtagtttyatgatgcccatttcacrgttcaggcaggtagaggcagaggggagcattaagctgacttgcccagcgtcrctgagttggctacgggcagccttcccaagggtacagatgrcaaacactgttccttctctctttcaggtggccctgctcagagcccatgctggcgagcacctgctgctcggagccaccaagagatccatggtgttcaaggacgtgctgctcctaggtgaggcggctgcctgccctggccagggctccagggagggtatgcctagcatggcactcacccaggcaaggagattcacatggtggcatgcaagggtgagggagactagtcaggagtggccctgtcctcaggcttgcattggagggctccaggactcagttttcaactgggtaccccactcagatgcaaggaaatrtggatgcaagtcaccaaattcccagcattgaagtcagagcacgatcagggttatccctggaattacctgtgcatccttttttcttttgacagagtcttgctctgtcactcaggctggagtgcaatgatgtgatctcggctcacttcagcctccacccgccacrttcaagcaattctcctgcctcaccctccagagttgctgggaccacaggcgtgcaccaccacacccagctaatttttgtatttttagtagagacagggtttcaccatgttgaccaggctggtctcaaactcctggcctcaaataatccacccgcctcagtctcccaaagtgctgggattacaggtgtgagccaccgcgcctggcctacctgtgcattctgatgttctttctggagtaggagcaagaggtggttaagaatggcacaaagccccagcccgcgtcacctgtgccttcatggcatagttattattttaaacgcttgtacagcacacactgtgtgccagggactgtgctcactgctttgcaaacactacctattttaatataacaatgctatgagggaagctcgattatttatcctcatcttatagataagaaaactgaggcacagagaggttaagtaacttatccaactataaccagctatcaggggcagagccatttaagcagggcagtgcagttccagaatctggtcctttaaccttgatgctttggtgcctatcaggtgacctttgaatgtcatcgatcttgtgagtcatgttggtaaatggagcttgggtcatgtgaaagaggtcctagaaagccaagttccaagctcagccggatgactcaaggcagcttatcttctgaatctgggcctcagcttccttacctgtgaaatgggagtcaccatccctgcaggtcctcctcccacaggcaccagctatcttgccaacttaaaagccaaaactagaggagaggggtcaacccaaggtgacttcccatcctccctccctcccaacccttccaggcaatgactacattgtccctcggcactgcccggagctggcggagatgagccggrtgtccatacgcatccttgacgagctggtgctgcccttcyaggagctgcagatcgatgacaatgagtatgcctacctcaaagccatcatcttctttgacccaggtacagtgcacacctcctaagccatccctgactctctctccagaacgctctgccagacttctcctattgggttctgtacactgagttcacagcctcatctcatgttaacgacagccaggagaggccgttttcatttaacagatgaggcaagtcaagatttgaagagacratatggccgggcgcagtggctcacacctgtaatcccagcactttgggaggctgaggcgggcggatcacctgaggtcaggggttcaagatgagcctggctaacatggagaaaccccatctctactaaaaatacaaaaattagccaggcatggtggtgcacgcctgtaatcccagctattcgggaggctgaggcaggagaattgcttgaacctgggaggcggaggttgcagtgagccaagatcccgccactgcattccagcctgggtgactccatctcaaaaaaacaaaaacaaagggaggatatgacttgacagggcaccctgactccaaaggcctgggctttcccttcttttacttcttccctccatccttctttctctttacttcccatcttcctcttttctttcatatttgcttcttttcctcaaaaaaatttatcaaaataatatctagaaccggatgtggtggctcacatctgtaatcccagcactwtgggaggcagaggcaggaggatcacttcaggccaggagttcgaggccagcctggccaacataacaagacctcgtctctatagaaactaaaaaaaattagccagggatagtggtgagcacctgcagtcccagctactcgggaggccaaggtgagcacctgcagtcccagctactcaggaggccaaggtgggaggatctcttgagcccaggaggtggaggctgctgtgagatgtgattgcaccactgcactccagtctgggtgacaaagcaagacctcatctaaaaaataataataaataaataaataaatctacacatacttaaaatgcaaatacttctccccatcctacttttccagctctaagtctactccccaagagaagcatgtctgattattttaattgtttcttctggcagtttcctcaacaattctaaatgaaagacaaagccttatatttgttgatgcatccattttggatcataatgttcctcctaggatggcagaggattttgcttttctccatcaccattcccatcttttcttccccatttttcccaatatatttttattgctatttttgagtctctgttgcaagttatgtgcttttatctttcctttcttgttctatcaactgtagacggtatctcccaacccttcacattgcaggatgaagaaaaagcattcctaccctctcctgtggctcttggctctcctctccccattctgtccactgacttttgcacctgcatttatacagaatgcatttgtcatcagtctttgtacaaaacttgcttttgtttcccagcatcaaaggtgcctgaactctggaggcttgcttgccttccctgcttacatgttagaggggacctactgtgtgccaggcactgtccttcacgctgcaaatagattacctctagtaataatagtaatgaaaaggctgggtgtggtggctcacgcctgtaatcccagcactttgggagactgaggcaggcagattacttgacgtcaggagttcaagaccagcctggccaacatggtgaaaccccgtctctactaaaaatacaaaaatcagttgtgtgtggtggtccgtgcctgtaatcccagctactcaggaggctgaggcaggagaatcgcttgaacctgggaggcgggggttgcagtgagccaagatcatgccattgcactccagcckgggcaacaagagcaaaacttcatctcaaaaaaatacatatatgtgtatatatatataatatatattatatatatataatatatagtgatatatatagtatatagtgatatattaygtataatatatattatatatagtgatatatattttatatatatatagtgatatatattatatatagagagagtgatgaagtggaagatgagccccatgtattgaatgctccctaaagagctgtttttaaacactttatgtggattgtcttacttaccaacatggtacctgtgaagtaggaattattattatctccattttacagataaggaaactgaggcatgattaacttgctcaaggtcacacaaccggaaaatggcagagcttggatttgaactkcagaccacctgtcaatcccaatttctctctctcaagcccacattcttacctaccacctgctatcccacacttaccagagggtgagatttctagttctagttccctccacagcctggcccagcctgtatcctctgtagtgctcaacacgaggctggactggcagaattgttctgcaaaatgggaaggatcactgatgctgagtcagaggcagcagcctccmgsaatttgaaggggcgggggacctagttcaaggcctggcatgcaggaggtgctcaataaacatgtgtggcctgaatgaactaatgaataagcatgattcagtggagacagcccactagaaatgtgggtgaatgttctttctgccacttcctttgtccatgaaagaggaaataaatgcattacctccatgaaggttgagattaaatattgtatgacygcttaagttcctttcyaggctaaggatctagaatttattcactgatttttttttcattcattcatccagccatctaacaaaaaatatacatatagttatcaataaatatatatttatatataaatatatattttttaaaatatatatatatatagtctgtcacccaggctggagtgcagtggcaccgtcttggctcactgcgacctccacctcccagtttcaagcgattctcccacctcacctcctgagtcgctgggattacaggcatgtgtcaccacgccaggtgaatttttgtattatcagtagagatggggtttcaccatattgaccaggctggtctcaaactcctgacctcaagtgatccccccgcctcggcctctgacagtgctgggcttacaggcatgagccaccatgcctggccctattcaataaatattgactatgcatggtgctaggtggtgagtttgaaaaggcaaaggccgggtgcagtggctcacgcctgtaatcccaacattttgggaggctgaggcaggcagattacttgaggtcagaagtttgagatgagcctgaccagcatggtgaaaccccgtctctactaaaatacaaaaattagctgggtgtggtggtgtgtgcctgtaatcccagctactcgggaggctgaggcaggagaatcgcttgaacccaggaggcagaggttgcggtgagccgagatcacgccactgcactccaggctgggggtcagagggagactcagtctcaaaataaaataaaataaaataaaaatggcaaataagacatacgcgtgcccctgccaaactcacagttggatggcacaacaattacatcctgtgtggtcagcagtgatggaggggccgcagagatttggaaacaggagggacacaggatacagatataggagggtagaaggcagacttcctggaggaggtgaaacctaacctgagtccctaaggtgataggaagcaggaaccagggaaggggagcctattctaacacagtagaagcagcaactgctgaggtctggatgaggggacctcaactgtggcccaaaaccccaagttcccattgtggctctgccaacaactggctgtgcgacccaggacaagtcctatctttgcactgtgtctgggtttccccgtgtgtaagatgaggcggttgctaggtgcttattggatgcattcctcaagtcccgccctccatctcctattcccctctcttctggtttagtgctttaggaaatgtggcagaaatctttttctgcctgtgtctaggaaatcataattcatgctggcgtaccctggttgttgaggtccctgaatccttgtgcccacactgctgaagactccttgtgtgayacaagtcaggggacatctgggtcttgactccccagatgctccasctggaccctgctgccctcccttgcccaccctcttccattgtagatgccaaggggctgagcgatccagggaagatcaagcggctgcgttcccaggtgcaggtgagcttggaggactacatcaacgaccgccagtatgactcgcgtggccrctttggagagctgctgctgctgctgcccaccttgcagagcatcacctggcagatgatcgagcagatccagttcatcaagctcttcggcatggccaagattgacaacctgttgcaggagatgctgctgggaggtccgtgccaagcccaggaggggcggggttggagtggggactccccaggagacaggcctcacacagtgagctcacccctcagctccttggcttccccactgtgccgctttgggcaagttgcttaacctgtctgtgcctcagtttcctcaccagaaaaatgggaacaaggcaatggtctatttgttcaggcaccgagaacctagcacgtgccagtcactgttctaagtgctggcaattcagcaaagaacaagatctttgccctcggggaggctgtgtgtgtgtgagtatgtatggatgcgtggatatctgtgtatatgcccgtatgtgcgtgcatgtgtatataaagcctcacattttatgattttgaaataaacaggtaatatgatagagtttaactgaaaaggaatcctctttagataggggaggccacaggagacctctctgaagtggtgactcttgtgctaagaccctaacggctgaaaggaaatggaaggcttaaaagacaagagaggaatattccaagaagaagaaactacttcaagggctgcggataggagagagtgttgtgtttgagaaagaagggcaaggttgtgagatggaggacgtgtaggaggtgaagatggagattgggcagaaaccaaatcataaacatatggctttgtcagccttttcagaaatttggattttattctcwttgcaactattgtaaggagagtgaaaaccagactaagtatttttattctttgagacaaagtctccctcaatcatccaggctggagtgcagtggcacaatcttggctgactgcaacctccacctcccgagttcaagcaattctcctgccacagcctcctgagtagttgggattacaggcgcccgccaccacgccctgctcatttttttatatttttagtaaagacagggtttcaccctattggccaagatggtctcaaactcctgacctcaagtgatcacccacctcagtctcccaaagtgctggaatgacaggtgtgagccgccacacccatcccagactaatgcttcaaacaaaccactctgttgggtagagagtgaattgcagattcctgagaatgtcactgtctccaatcatgtgatggatgatggaggcttggaccctggcaatggagcagtgaagataaacctgatcatctatttggaggaagagcccacacccacaggatttgctgattgatcagacatagggagtgagagaaagaggaagagtcaaggacaaagtctacatttttgctttgagtagcagaaatgacgatggagtaatttactgaaatgaggaggacagaataaacaacaagacactgggtctgggggtggtagtgaggggtgacctcagagatccattgtggaccctcttttcttttttcctttttttttttttttttgagacgagatctctctctgccacccaggctggagtgcagtggcgcaatcatagttcactgtagcctcaaccttccaggctcaagagatcctcctaccccagcctttcaagtagctgggactacaggtgygtgccaccacacccagctaattcttcattcttattttttrtrgagacaaggtctcactatgttgcccaggctggtcttgaactcctagccttaagcaatccttccgacttggcctctcaaagtgctgggattacaggtgtgagccaccatgcccagcctcattgtggactttcattaagcatgagatgactattacaaatccaagttatcaaggaggctgttgaatgtatgagtctgttgctcaagcacaagattaaaggcagctctgtggaatcagggggaagatggagccatggagggaagggaagaagactggccagaggggtaggagaaaaccagggcaattccagaatccaagagaagagcgtgtttgaaggacagagtgtttaatggtgttaaactctacagagaaacagaaagaagcggggargaaaggagaggtgaagagaggaggggaagagagaggaaagggtccattggattgacagctggaggctcttggcaattgtgttgaaagcagcatcagagagctgggagagtggaaaccagattggagagtgctccaaagagagtgagtgggaaggtggagatagagtagataaccctttgaaatggtttgactatgaaggggagtatgaaggagttaggatgactgcaagggagtgattagaatgataggtcatggagtctgggctgcactcaaaaagaaataaagatagaggccgggcacggtggctcacacctgtaatcctagcactttgggaggccgaggcgggtggatcacttgaggctaggagttcaagaccaacctggcaacacagcaaaacaccatctctactaaaaatacaaaaaaaaattagccagacatggtggcatgcacctgtaatcccagctactcgggaggctgaggcaggacaatcacttgaacccgggagatggaggttgaagtgagctgagatcatgacattgcactccagcgtgggcgacagaacaaggctctgtctcaacaacaacaacaaaaggatggggtgatagtgaaaagagagtgtcagtgaattgacagtctcagtagggctgaagaatttttgcagcgatggtattagattacgggagctggaaggacatgaggtgaagtcaaagtggggatgttgaattcgagattttggaggtgtttcagtgactgaagatgacaaggcgagggtgaggtttctcaacattggtactattgatacttggaactggacaattctttgttgtgtggggctgtcctgtacattgttcagctgcatctctgtcctgtacccataaggtgccagtagcacttctccagtggtgacaaccaaaaatgtctttggatattgtcaaatgtctcctgatgggccaaaatcatccccagttgggaatcgctgttatgtgatagctcatttcattctcactttgaccctgtgaacatggggttattatgaatcaggtgtcattgagatcaggatcaggagcctgtggtctgttgccaaataattaagagctctctgggctcagttgtctcatctgtagaatgggctaataatagtatccatcctataggattgctgtgaggattaaattatgtgaaacatgggaagtgctatacaacagtacctggcacgtgataattgttaattatcaacaattgttatttatcactgaaatagatgtactgtagagatckcttgcaagcgttgaaattccatcatcgtcatattactcaccataggctattattaaaccatatcccatgtggtatttttactccctgacatatgtttgaagcggttactgtgttccagacaatctgctaggccctcaaagaaagaagaaaaatacctctgaaattgtaatgctcatagacagaagaagtggttgttcctaaaagttgtgttacagacaaattactatgagaaatccaaggaaggagaatcaggagaggcttctaaagagaggaaatatatgagctgggatttgggcttatggacatggaacaggtttggggtggaaaaacatctctgacagaagcaacaacgtgagcagaagcatagagatagaaaaacacaggggacacatagatgctataagtaggtcagytggctgcagcagagatgtgggggatgaggctgaaaggtgaggcgggaccaaatggttgaaggacttgcactccaaggagctttgagagccattgattacatccattatgttactatgtgaccaatacactactcattagaacatttacgtgatctcagagcttccttatatgcaccttgttcctttcaactcacttttgttctcttggttttttggggtcctcttaacaccctcatgaagtctatagatgggaatggyacaccctagtttactaacccaggaataggtacccaacaggcactgccaatattggatgggctggttgattggccacgcctgaggaagatggcgtcccaaggcctgaggtctgcatcccagactctccatcctgatcgaccttctctacctgcagggtcccccagcgatgcaccccatgcccaccaccccctgcaccctcacctgatgcaggaacatatgggaaccaayrtcatcgttgccaacacaatgcccactcacctcagcaacggacagatgtgtgagtggccccgacccaggggacaggcaggtgggcaaactctgggattttaccttgcaaagggtgaggatggggcttaagacaggaggcaggagaaagtggagtctagaaggtagaaccaggatgcaacagttttctgggttccagggtagggaataaagggcaagattgtccatttgttgaggctgtttattcagtaaggtgactgacagcctttactgaatgaagccattgttgggatgaggcaatccactggatgaggtaacccattgggtgaagatgttcttgggtgagaattccattagttgacattgtccattaagtaaaagtggtcattgaagtaaggctgcacagttgggtaaggctatccattagacaattakatgagactacccattgggtcaggatgtctgctgggctagaccatcctctgaaacctccaaagtataaacttgtcattgggcaaagctcttcaaaggataagattatcaatgggatgaagtgatccactgagataagatgatattttactgacattgttctcagggaaagttttccattgaacaaagatggccaattgggtcaaatttgctctccaaacctgccatgagagtgaggccaattagtttctattactcatctcctaaatatccaagaaatggtattttttgagccagctggtccggggtttcatcaactgctgctccttctcccaggaaagamtatccctgtcacccatcccattgccgctggggacagccaggcctgggccttggtttgggagaagcagtccaagtctgcatatcaaataaatgatggaggagatgggtggtaggaccttccagacctcataaaacttaggctttatgatctgggactcacagaaggttgagcaataaaagaccttagggattmtctggyttaattaattctctcattttatagaggaagaaattaagtcaaggtggggcagggtgggaggggagaactttcccgggsctcttcatttactcccacaaaggctggaattttgagcagcccctgtctgtctgtttgtccttccagccacccctgagaccccacagccctcacckccaggtggctcagggtctgagycctataagctcctgccgggagccgtcgccacaatcgtcaagcccctctctgccrtcccccagccgaccatcaccaagcaggaagttatctagcaagccgctggggcttgggggctccactggctccccccagccccctaagagagcacctggtgatcacgtggtcacggcaaaggaagacgtgatgccaggaccagtcccagagcaggaatgggaaggatgaagggcccgagaacatggcctaagggccacatcccactgccacccttgacgccctgctctggataacaagactttgacttggggagacctctactgccttggacaacttttctcatgttgaagccactgccttcaccttcaccttcatccatgtccaacccccgacttcatcccaaaggacagccgcctggagatgacttgaggccttacttaaacccagctcccttcttccctagcctggtgcttctcctctcctagcccckgtcatggtgtccagacagagccctgtgaggctgggtccaattgtggcacttggggcaccttgctcctccttctgctgctgcccccacctctgctgcctccctctgctgtcaccttgctcagccatcccgtcttctccaacaccacctctccagaggccaaggaggccttggaaacgattcccccagtcattctgggaacatgttgtaagcactgactgggaccaggcaccaggcagggtctagaaggctgtggtgagggaagacrcctttctcctccaacccaacctcatcctccttcttcagggacttgggtgggtacttgggtgaggatccctgaaggccttcaacccgagaaaacaaacccaggttggcgactgcaacaggaacttggagtggagaggaaaagcatcagaaagaggcagaccatccaccaggcctttgagaaagggtagaattctggctggtagagcaggtgagatgggacattccaaagaacagcctgagccaaggcctcgtggtagtaagaatctagcaagaattgaggaagaatggtgtgggagagggatgatgaagagagagagggcctgctggagagcatagggtctggaacaccaggctgaggtcctgatcagcttcaaggagtatgcagggagctgggcttccagaaaatgaacacagcagttctgcagaggacgggaggctggaagctgggaggtcaggtggggtggatgatataatgygggtgagagtaatgaggcttggggctggagaggacaagatgggtaaaccctcacatcagagtgacatccaggaggaataagctcccagggcctgtctcaagctcttccttactcccaggcactgtcttaaggcatctgacatgcatcatctcatttaatcctcccttcctccctattaacctagagattgtttttgttttttattctcctcctccctccccgccctcacccgccccactccctcctaacctagagattgttacagaagctgaaattgcgttctaagaggtgaagtgattttttttctgaaactcacacaactaggaagtggctgagtcaggacttgaacccaggtctccctggatcagaacaggagctcttaactacagtggctgaatagcttctccaaaggctccctgtgttctcaccgtgatcaagttgaggggcttccggctcccttctacagcctcagaaaccagactcgttcttctgggaaccctgcccactcccaggaccaagattggcctgaggctgcactaaaattcacttagggtcgagcatcctgtttgctgataaatattaaggagaattcatgactcttgacagcttttctctcttcactccccaagtcaaggggaggggtggcaggggtctgtttcctggaagtcaggctcatctggcctgttggcatgggggtgggacagtgtgcacagtgtgggggcaggggagggctaagcaggcctgggtttgagggctgctccggagaccgtcactccaggtgcattctggaagcattagaccccaggatggagcgaccagcatgtcatccatgtggaatcttggtggctttgaggacattctggaaaatgccactgaccagtgtgaacaaaagggatgtgttatggggctggaggtgtgattaggtaggagggaaactgttggaccgactcctgccccctgctcaacactgacccctctgagtggttggaggcagtgccccagtgcccagaaatcccaccattagtgattgttttttatgagaaagaggcgtggagaagtattggggcaatgtgtcagggaggaatcaccacatccctacggcagtcccagccaagcccccaatcccagcggagactgtgccctgctcagagctcccaagccttcccccaccacctcactcaagtgcccctgaaatccctgccagacggctcagcctggtctgcggtaaggcagggaggctggaaccatttctgggcattgtggtcattcccactgtgttcctccacctcctccctccagcgttgctcagacctctgtcttgggagaaaggttgagataagaatgtcccatggagtgccgtgggcaacagtggcccttcatgggaacaatctgttggagcagggggtcagttctctgctgggaatctacccctttctggaggagaaacccattccaccttaataactttattgtaatgtgagaaacacaaaacaaagtttacttttttgactctaagctgacatgatattagaaaatctctcgctctctttttttttttttttttttttttttggctacttgagttgtggtcctaaaacataaaatctgatggacaaacagagggttgctggggggacaagcgtgggcacaatttccccaccaagacaccctgatcttcaggcgggtctcaggagcttctaaaaatccgcatggctctcctgagagtggacagaggagaggagagggtcagaaatgaacgctcttctatttcttgtcattaccaagccaattacttttgccaaatttttctgtgatctgccctgattaagatgaattgtgaaatttacatcaagcaattatcaaagcgggctgggtcccatcagaacgacccacatctttctgtgggtgtgaatgtcattaggtcttgcgctgacccctgagcccccatcactgccgcctgatggggcaaagaaacaaaaaacatttcttactcttctgtgttttaacaaaagtttataaaacaaaataaatggcgcatatgttttctaagtccttggataagtatcttttctttcaggtatcagaaataagactgaatcttctggttctacttgggggttaaaaaattttttttaaaggaagaatgagaatagttttatagttctttgtgatgtgcagaatgtttttgtgtccattataatttttcagtcttcacatcaagaggtaagcagttagacatgattactcccactttccagatgaggagactgaggcttgggggaagtgacttctcttggaaggcagaggtggacatctaaccctggtctcttgattccaagtacttagtatatcgagagagtgaaagttgatcccccttcttgaagaggggagtgatgaggggagagtgcaatggcaagatctggaagaatggcaagagggtccaagggtctgtcatcctccaccaaggttcaagacagaaccttttgctgggtcacctcaatctgccagcaatggaagatgagtagctgtggggacatttcataaaagcaagtggkttttttgttttgttttgttttgttttttgtttttttttctagaacaaggctgtgcacagtggctcacctctgtaatcccagcactttgggaggctgaggcgggaggatcacttgagctcaggagttcgagaccagccagagcaatataaggagaccccatctctacaaaaaatttaaaaattagccaggtatagtggtgtgtgcctatagtaccagctactctgaaggctgaggtgggaagattgcttcagcccaggagttcgaggatgcagtgagctatgaatgcaacactgcactacagcctggatgaaagaacaagactctgtctcaaaacataaataataagtaaaaagaataaaagcaagagatgcacttgagaatctccagccagatctgtagccactgggcttctctccaaggctaaactattacaggagggtggccttgtgtctcggtcaccacagaccacagcgttccattcactcggggttgtgctggagctggcttgtgagaactgactgttagcttctcttcccaactccatgtttgccagtgccacactgatagcttgaaattggttattgccggagtgtttacaccacaaggactagcaaactctacaaatccgggcttttgttcctggagagcccgttgttaacattcaccagcacaccacagcattcggcaatggctggaccatgggatgcctacatatggggacatcctccttggggatgagggtagagcagggcgatcctttcacctcttccttaagggaggggacaaaagttctggtctgggaagcacacgttttgctgatcagcgtaaccttgggcaggtcactccaccactccgagcctcatctgtaaagtgggaatgatatctccctccagggcagatgtcaggattcaatggaatgagatcacagtaactgtgagagctcccgttacatgaggagtacaagtgaactcttcatgcgcccctttttagcgagaagttaaccattaaactctccaggcttcagagcacccattcgctgtctacctgatccctagggccgctcccgccttcccctgtgccttccctccactagtcagcaccaggaaatgttttcgataacgttgcaacggaggccttgttcatgctgccgccatcggggacaagcgcggggggcggsgggtggaggccagaggagactatttcagtcctaaattgtgcttaataaacccatatcaaaaccataaacccttggctgccataaattcctctacccttggatcctccacctcatcagscctttgccctggttaatctcaaatctcagcgcaggcagccggagctttaggtttggtttctacttcagttgctaaacagcatcagctcaggtggcagacagtaaaattcccattttagagatgatgaaactgaggttcagaaaggtgaagaaacttgtccaaggtcacacagctagagaccccagccaagacctgagcccatgcttccaccacccaggtagcctgattaagaaatgggaattcttggctgagcacagtggttcacccctgtaatcccagcactttgggaggccaaggtgggcggatcacctgagattaggagttcaagactagcctggccaacatggtgaaaccccatctctactaaaaatacaaaaattagccgggcacagtggtgcacacctgtaatcccagctactcaggaggctgagccaggagagttgcttgaacccaggaggcggaggctgcagtgagccgagatcatgccactgcactccagcctgggtgacagagcgagactccatctccaaaaaaaaaaaaaaaaaaaaaaaggaattctcaattctcaagcttctcggggagacagatttgaggtttcctcttacatctttgtttggtggccctacaattaaacctctttctctgctacaaaacaatggaaaaaaactggaatttctaaggctcctcatttttttttttttttttgagtcagggtctcactctgtcacccaggctggagtgtagtggtgccatcatagctctctgcaacctctgcctccagagttcaagcaatcctcctgcctcagccttttgagtagctggggtacagtgtgccagcacacctggctatttttttcttttatttttagtaaagatgaggtcttgctatgttgcccaggctgacttctttttagcacctctgaaaagttgtttccccaagccatgctactagaagcttcttattccatcattccatcattgctcagagtggggaccagaagtagaagggaccctgggtgacaggctgcttgaagatccaaagaaagtttcatgcagtgtgaatggcctgtcatcccaaattggtgaaatcgtcctacttcctcatttgtggaacccagataacctttgagctacacttctcaaatccacgtatcatatgtaaattccaggatgtgatctcagaggcctgaatcacaggatcccaggcagctgtttgacaatggtggagttagacaccaaatcatgatgccaaggacatttactgggctcttcctctttgccaaacatggctggacataatttaattcccacaacaacctctgaggctgtcattcttgtggttctgtttcacaaatgaggaaacaagrccggtcatggtggatcacgcctgtaatctcagcactttgggaggctgaggcaggtggatcacctgaggtcaagagtttgagaccagcctggccaacgtggtgaaacctcatctccattaaaaatacaaaaaaaaaaaaaaaccagccaggcgtggtggcatgtgccagtagtcccgactactcgggaggctgaggcagcagaatcgcttgaacccgggagacagaggttccagtgagccgagatcatgccactgcactccagcgtgggcaaaagcttgagaccctgccacaacaacaacaacaacaaagaggaaacaggctcaggag

SEQ ID NO: 8807 - DNA, 38282 bp, Homo sapiens
tttgctcactacaacctctgcctcccaggctcaagcgatcctcctgcctcagtgtcctgagtagctgggaccacagatgtatgccaccacacctggctaattttttttgtatttttggtagagatgagtttttaccatgttgcccaggctggtctcgagctcctgagctcaagcgatctgctctcctcagcctcccaaagtgctgggattacaagcatgagccaccacgcccggcctatagtcaccacgcccagcctatatttgtttaataaagtaattcgtgtttgttacaaaagactcattaacagagaattgtaaaataaatgatacagagaaacgaaaataaaagtcacctcagagataattaaaataaaagtacaacttagaggtaatcaccactttcgttttggtctgcgaggcagcagagcatagcggttagaagctcaagccctagtcatactacctgagttcaaacaccaggcttggaccagtgccatagccttggaccatcatcatcatcttggaccagtgccatagcctttctaagactcagtttcctcatctagagagtaattataattttatctcattaaataattgggaggaccaatgaaatagttcaagtacaatgtactgaggctagtacctgacataagtacttaataaacattagatattattgctaatgtattcccatggccttaagctaatgttaaactcttacattagcaaaacacagttctgatcattttacatgcattaaatcatttaattctcacaactttgtaagtgtgtactactatcatccccattttacagataaattggagagacagataaatgatagaaccaagactggaatgcaggcttatctctatactatacagcccgcagtggattttatcaatcattcttttttgaaaccaactccctactcccgaacttaagctgtatctttccatatcagttaaaaaaaatcaattttaatacttgaataatagtccattttctaaatttacctgaaaatttataatatatctgaaaaacattccctattgataacactggttttttaaattacaaacaacattatgatgaacatccttgtacagacacctttgtacatctatctactttcttaggatcaattcctggttcaaatgaactcctgaaagaatatgccagtttgtttttaccaaataaaaacatgagattaataaggtgagactgagcaagatggagtctatatggcggtgagtaaccctggttgccaggcatgggatgtcaagagcctgagttgggtgaggaaggtgtcctgtagaggagacagtccaggactaggagcagaagctgaggacattcatgcaggagggtgctctggtgtggggtgtcaaagcctcagcagcacaaggacgtcacccatacaggaaggaagggagggcagtgagtcctgacatcagatgtcagaaactatttagggtaaggagggcatcaatgctgagggacagtagtggcctgttgcagggtttaaagcctgaacaggatgagggtataaacctgagagggatggtggcagccacctgtcataggatgagggtgctcacaaaggaagatgacctggtacaaggtgatggagccagtgcagggtgacagagcctaagcagagtcaagagggtgtgagggtgggtcagcggcagcaataaggattgatcaaatatactgaagatgttgggtgtcgggtttctcattgttagtgaaggaagttacaaatatgaaaatggactgggcgcggtggttcacgcctgtaatcccaacactttgcgaagccgaggtgggcagatcacttgaggtcatgaatttgagaccagccaacatggtcaaacgccatctccactaaatgtacaaaaattagccaggcgtggtggtgggtgcctgtaatcccagctactcaggaggctgaggtaggagaatcgctgggagggagaggttgcaatgagcagagatcatgccactgcactccagcctgggtgacagggcaagacttttgtctcaaaagaaaaaaaaaaaggagaaaactagaatgaatagaatgaaccctgtattactggatttggattaaagtggagatactgatgtgaattcacataagtaaaatacagaaaaatatttaaatgtaagtatgtgtgtgtgtatacactttcaacttacaaaattttcaatttacgatggatttattgggacgtaatcttattttaagtgaagaagcatctgtattaacatcaccatagcacccaaatctaaatatcattctacactaaaaagaaccaggtaccctaagagaaatgactgattccaggcttggggcagggaaagcacatatgagcctggaatatcttcttgtgccagaaagtaatgacatgctcaaagaatgatgttgtcatgtcaaaaggccacagaagctagcttaatgacaaaatcttggatatttaaagcatcacaatccagtaaaagatagtaacacactgaacaaaataggtaccactgagttcatcatactgataaaaaagtaaatgcataagcccaaagtgtttgaggaagcacattacagacagctgggagcagtggcttgggcctgtaacctcagctacactgaggctgaggtgggaggattgctttagcccaggaattccagactagcctgggcaatatagcaagatcctgtctcaaaaaaataagaatgaaaattacacagagaaaaagataactttagagaactttagtagaaactatcttaatctagttatcaaggttaatatcaccaataatgggacaaatcaaattgtgtacaatctgcaagggagcagagtatcactcctgtgatattcctgctaaagatgtatataacctgaatctaatcaatgaagaaacagacaaatctaatttaagggacattcaacaaaataattggcccaggattattcaaatgcagtaaagtcatgaatatcaagggaagactaaggaactgtttgatggagacatgacaattaaatttaacacaattctagactggatcttattgctaaaaagcgttattcaaacaactacagaaaatttggatggcatctgaggagtagatggtcatgatatatccatggtaatttccaattttgatggttgcattgtgattatgtaggtttatagagaatatataataaaatatcttgaggatgggtagaaaaagaccattgtgtcagcaactactttcaaatgttggttgaggggaggttttgatactattcttacaacttttctaaaagtttgagattgtttcaacataacaaaatatgtgattgtcaatctccttacactaaccacataaacattaaacatttttttgcaaatttgataggcaaaaaaactggaatcccactttaataaaaaaaattttcagctgggtgcagtggctcacacatgtaatccccagcactatgggaggctgaggcaggtgaatctcctgatcccaggagttggagaccctgtctctctttaaaaaaaaamaaacgaaaaaaaaacaaaaaaaagcagtggctcatgcctgtaatcccagaacttgcagaggccaaggtggacagatcgcttaagtccaggagttcaagaccagcctgggcaacatggcaaaaccccgtctctacaaaaaaaagaaaaattagctggcacagtggcacacatctgtagtcccatctaattggtggaactgaggtgggaggatcacttcaacctgggaggcaaaagttgcagtgagccaaatccagcctgggcaacagagggagactccacctcaaaaaaaaaaaaaaaaaaaaaaatcacatccctaatccctctctcacatattataacttatttttatcatttgtctctgcccactagaatataagacctactagggcagtgaacttgattcactgatgtaccccaagcacctaggtcagtgccccagcacatggcagacaataaaaaccaatgaatagctgggtgcagtggctcatgcctgtaagaggcagagacaggaggatccttgtcacaccactgtagtccagcctgagtccagcagagcagagaccctgtctcaaacacaaaaacaaacaaaaaagcccaatgaacgactgaagggatgaatgaagtatatttagttctcagtaaatggtaaggatgatagggataatcagcctttttattcccctattgcagcggtccccaaccgttggcaccagggaccggtttcgtgttagataatctttccactgactgggagaagggctggggggatggtttcggggtgattcaagtgcattacatttatcattagagtctcataagcagcatgccacctaggaccctcgtatgcaaagttcacaatagggctcacaataggtttggcacattcctatgagaatctaatgcctaggtggagctcagggggtaacgttctatcggccaccgctcacctcctgctgctttgtggcccggttcctaacaggccagctgtggacagtgggttggggaccccatggacaggcaggtactagtctgtgcacagggggttggggacccccgccctactggaatgtaaactgcacgagggcaaggaattgtatttttgtgccccaggatatcgatgaacattcctattatgtacaggcagttttttttttgttttgttttttgttttttttttttaagagatggggtccttgctatattgcccaggctggtcttgaattcctggcctcaaatgatgctcccgccttggcctcccaaactgctgggattacaggcgtgagccactgcacccggcccaccatcccagtttttttttttttttttttttttctgagacgtgatttctttcttgttgtccagggtggagtgtaatggcgtggtcttggctcattgcaacctctggttcctgggttctagcgattctcctgcctcagcctcccaagtaggtgggattacagtcacccactaccacgcctggctaattttgtgtgtgtgtttttggtagagacggggatttctccatgttgacaaggctggtctcgaactcctgacctcgtgatccgcccgcctcggcctcccaaagtgctggaattacaggcatgagccaccgcactcggccgactcactatcccagtgacagccaatgacagccttgttgcaggaaggtggtattacactcattcccattttaatgatcagggatcaggttcggagaggccagggcggagagcccgcccgaatccagtgcccccgacggcggttgggcgagggtccgggagctccaaaccgcctagggccgcctgctcgggatccccgttgctcaccttggcctcgggctgactctcctcgagatcccaaccggctttcatcgcctcagctgccccgaccagcttatttggggcctgcctgctttccctgaccttcctggggtgtctctcggtcccttccctctctggctccatggctgtggagaaagatgaggtagagctggggaaactccagcgcccctattcccccgcgtgccgcctcctagcgggagagctacacgggcttgacagctttcaacctccctcggatccgcttctcaattcagtttaccgaactatccccgttcccctaaaaaagcgaaggtgccaacgatctccccgttccgcggactggacacccgcgccgctctaacccaaacggctttaccgtccgcatcggttaccggattctcaacggttccccaacggctacaacgggcgtctgcctggcaaagaaggaaggtgctgccgagcggcttcgccgcctaaaaccactccccacgccccctagcccgggaaacgcagaagagaagacgggcggggagcagaggttctcccctccttagccacagctgccaacaacaaccgcccctcagcctcgcgggctttttgaacggaccggaagtagaagtcgagcgacttccggcagctggacttggaaaagcaaggagtgtcgggaatggcgaccaagcggctcgcgcggtactcgagggagttccgggtcgggggcgggtagctccgggtccagcgctggcgttggccgcagagcagggcacggcaggtggcatctgcggtgagggcctctattccccgcagccccggcgtctgcgacctgccctctctggcacggttggaaaggcgcctccctggacctcggtcttcagccttgggccaccttctacccgagggtgacaggagcccgaggcggacgaaccctggggccttgactgtgtggccttgagccagtgcctgcctattttaggccttgggaaacgactggacgtgacagtgccctgcagactggttggaggtctcaggcaggccacacactgaatctgtcaaggtgttcaacctgttcgaaatgctcgttcctcggtgctgtaaagaaatagaacttaaacttaaatttaatttatttagtaaggccatttttacttcctgcagaaagggtacactcgccagcagttttgccaggagagtacactgaacaaaggagacagggtcatttataacgtggcgcgtccaccctactgctgtgtccggtttcctttggctggaacgggacctcacattctgtatttgtcccgactgactagcaacatagaactttttaaaagaggcaaaggcagaggagaacaaaggaagaaggaagtaacttgtggaatgctgagaaaggtaaaaacacttttaagtaaggaagaggaacaggctatgacctaatgtttgattggaccagtataagcatgccagggcaaatatttaggctaaattgtgggagctaagaacataaagtacattgatttctttattatakctagcagatatttaagaatgttagcacaggtctttgaataaattttgctctaagagaagttactatttattcctaattagacggggaaggaagtctttgaagaggaacctctactttttacaaacccattttctagtgatctttttttttttttttgagacggagttttgttgcctaggctagagtgcagtggtgcgatctcggcttaccataacctctgcctcccgggttcaagtcattctcctgcctcagcctcccaagtagctgggattacaggcatgcaccaccacacccagctaattttgtatttttagtagaaatggggtttctctatgttggtcagactgttctcgaactcccgacctcaggtgatccacccgcctcaacctcccaaagtgctggggttacaggtgtgagccacggtgcctggcctagtgatccttttaattcacaatatgaattattgtgtcctccctgattcctggatgcgctgtgcatatttctgattactagaaagatgtaatataatagcaaatagcatgagcttcagaattggacagtcttgggttcacataccaaagctatgttctttggcaaattaagaatcagttttctcatccataaaatataggtaggaaaagtttctagctactacacttgttgaggattaaaggaggccatcatcttagtttaattttagtacctgctatgtagtaagcagtcaataaatgatatttattattcccaaatcctggcacttcccactcttagcaaacacagaaaactacaggaggtgtctgcctagttaaaactctacctgctaataccaagtagtttgttttacttgcacttaagacctcagtaagctcttctctttttttcttattttattttatttatttatttttttgagacagggtctcgctctgttgcccatgctggagtgcagtggcatgatctcggctcactgcagtctccacctcccgggctcaagcaatcctcccaccttagcctcctgagtagttgggactacaggtatgcaccatcacgccccagctaggttttataatttttgtagagacggggtttcaccatgttgctcaggctggtctcgaactccggagctcaagcaatccacctgccttggcctcccaaagtgctgggattacaggcatgagccactttacctggccctatcttttgtttctttacccagatttttaaactggaagactgaaccatgtcctacattgtcttgtcttcttaaaactgcactgtacacatagcaagagcttaaaaaatgcagggggaaaaataagattttcagtgcatttttacctctacaatcaaatgattgtaggaactcaaatgagttactcagtattactgtaaaacaagggtaacataaaattagtgtaaattggctggacacagtggctcaggcctgtaatcccagcactttgaggggctgaggtgggaggattgctggagctcaggagttcgagatgagcctgggtaacatagtgaggccctgccttcaaaaaaaaaaaaaaattaaaactaatgggccgtggtggcatgcatctgtagtcttagtcaggagactgtggtgggaggattgcttgagcccaggagattaaggctgtagtgagtggtgatcataccactgcactgcaacctacgtgacagagcaagaccctgtctcaaaaacaaaaccaacaaattagcctaatttgcaaatatgtactttcgaggcctgtgcaggtaaagccaaagtccagttcgatttcccctcagtcacaataaataatgagattgttgcccagtaccattagtttggtagcctactcaaacaggagtgtgaatgagttcattgatcatatttggattgcttcacatttttaggcagcttggattaattaggagaaagtcaattgcgccagcaaatggaaatctcggaagaagcaaatccagtgagtagtatgcttagtttctttgcattttgtagccttgcattttcagcactggtaaagcataagaacaacttgatcttttgcagagcagttgtttgactacttaattgtcattgattttgaatcgacatgctggaatgatgggaagcaccaccatagccaggaaataagtaagtctgggctacgaatggccaaagctggcactagatgagtcactttaaagtttatagatctgaatcagccaaaagtttaagaaaacaggatggtctatgcattggtagtttaatgcaaaacttatgttgaataaaaaagagcaaaatctcaaatacctaaatgtgttattatataaaatagttgttttatattacatacaacacctcaatggcatagaaactgaaaaaaatgcctttgcaaaaaaagtaaattttatattccatatggtttttatatttatttaattatattgttttcttttaagacaacatgctcataacttcaatattttgactttagcataactttattataacctttatgtcacactgctttggtcattttagtatgcttttactgaaaactggttgtttaattaaaatggtaacatgtttaatttaggatgattacaggattaatttaaaaattatttattcaactgtcaattgattattctttcatttagttgagtttccagcagtgttgctgaacacatcaactggacagattgactctgagttccaggcttatgttcaacctcaggaacatccaattctttcagaattttgcatggaattgacaggcataaagcaggtatgatgcaaatcttaaaattcagaagtcagtttcaaaaagaaaataaaagttattataccatttgaaattagatttatttagtgttaggcatgatggcttatgcctgtaatcccagcactttgcaggctgatgttcgagaattgcttgaggccaggagtttgagaccaacctagacaacatagtgagaaccccatctctaaaaaaaaaaaaaaaaaaaatttaaattagcctgacttggtggcatgtgtctgtagtcccagcttcttgggaggctgaggctgaggtgggaggaccacttgagcccaggagtttgaggctgcagggaggtataatctcagtctatcctgggtgacagactttgtctctgaaaataaatgaataaataagtaaataaataaataagattagtgttattccagattcaggactcgatttatgtatttatttatttatttttcagacaaaggcatgctctgttggccaggctggagtaaggtggcggggctcactgcaacctctgcttcctgggttcaggcgattctcatgcctcagcttcctgagtaactgggactataggtacacaccaccacatctggctaatttttatatttttaatagagacagggtttcactatgttggccaggctggtctcgaactcctgacctcaagtgatctgcccaccttggcctcccgaggtgctgggattacaggcgtgagtcacctcaggactcgatttaaaaagcaaaggaacatacctgtaatctcagtactttgggaggccaaggtgggtggatcatctgaggtcaggagttcgagaccagcctggccaacttggcaaaaccccgtctctactaaaaatacaaaaattagccaggcatggtgttacacacctgtgattcccactacttgggaggctgaggcaggagactcacttgaacccaggaggtggaggttgcagtgagctgagatcatgccactgcactccaccctgggcaacaaagcaagacctcgtctcaaaaaaaaataaattttaaaaattaaataaatacacagcaaaggaagaataatgttataaaaatgaggatcaaattgattttatggaaattaagtgactcaaatttgtctatgatttatgtcagtctggacttaatgatcatatttctgtgtgattttagtttttatcaacctaatctttcttaccttggtgggttctaaatattctttctttcccacgtgtttttacctctttccactaaataaactctttgccagttagaaccactttgttatgtcttcccacagtacactgtgttttcatgacttggcatttctgattcttttaaaaccattaatctttctccacagttataaaacatgctaaataataatggaatttgattgttgaattcagcttttgtgactctctactcaggctcaagttgatgaaggagtccctctgaagatttgcttatctcagttctgtaaatggattcataagattcagcaacagaagaacattatttttgctactgggatttcagagccttctgcttctgaagtaaaattatgtgcatttgttacttggtcaggtaaagaataagttatacctattaatcacagatgggtagcattaccactatgtaattctttatttctagttttatacttgctaacctagaattatgtttgttaatcttctgggctaggaaaaaaaatttaaatgcctagcagatgttagccaagaaaagtaaattaatacatattttttaaattaaccttttgggataccttaaaatattaagcctgaacttaaaaaaatgtttctagagttccactgttaagaattaagcaaagatgatttagtgaacactcttatgctattttctacagtcttcatcagctcaacatcctttgcttttatgctttgacacttaaaagaaaaaaaaaatgagccatttaaagtaggttttttgtatgactgtgttagagcattgctgttaatagtcattaatagcaatactgtgtcattgataagatagcattgatagtcatatttggtttccagttactataaaatgtttggtttctcaataacattaatattttcctagaatatagaaaatatagtccttgtaatttaacatgttactcttctttctgaaataaggttttactgggtgtttaagaaatcattttgaaatttagtcatcaacctaacttgttaatagtaagttatataaagtgaataatttttagatattagcagagcaatgaaatcatactgttctattttatatgatcttctagcattctatttgtaaatggtggcagcataagtaaaaaatgctggcatcattgactttgttctattttaatgtacctaatgcagactgggacttgggggtttgcctggagtatgagtgtaaaagaaarcagctgttaaaacctgtgtttttaaattcttggattgatctcagagcaacttacaaggtaatggtaaaaaatgggggcatgtttacttttttctatggaaaaatgattaacttttatcctacacatgggcatgggtttctgcaaagaagatactttcttttgtactggtcacataaatgcatttcttaaagtatttaaaaacaacacacaaaaaataagcacattctaaatctaatagaactaaaaattatgaaaagtgtttaatacatagtctttaaaatagtaatcttctyttaaatatatctttttttattggttagcttttctataggagaaaaccaaaaggactaagtggtgccttgcaggaagtaggaatagaattctcaggacgagaacattctggttagtatacattaaaaattatgtaagccayttgacttttaaaaaatacttcatatgaatttcattttttggtaatgtcattagtaagggatatcttcagcctaaaaaaaaaaaactcctaatctaaacaattcacattgtttctaagactttcaaattaccactttcataaactattgtaagatamactgccatctagtggctttctagttgctaagaagaatgaaaagaatgagccaaatcaaatggagattaaacaagtgctcaaataatagaatggactagtgaaaaaactgaacaagactattagattattcacaaatcctggttcctgcagaacgctggccacattttggggaactgtctaatacattttcatatcctcctctataaatgtggacgagcttgtctttcactggtaatgctgccatagccttccacttccaagaccagtttatcatgattaaaattagtagatggtcataaaactaaaactgtgttccaatttctacacaagtggtgtttttctttttaagttatttctttagyactaaggaaatagtactagtaccactaaattcagtgtttgatatctgtatcctcagggttggacgattctcggaatactgcccttcttgcttggaaaatgatcagagatggttgtgtaatgaaaattacaaggtcgttgaacaaggttagtagtgtcttgcctttttattctgtcatctcaaacttcataaacagtcatacgttctttgaaacgtagatttaatgtgtgcagtcatttataaatcaatgacatttctcttttttgtcataaaactgtatactgaagaaattaacgaatgcacagtttctaaagctgttgcatttgtctgtggaatcataggttcccactaagaagaatttcagcattctggccagaaatttgaatacaattcaagttgaagaaatgtctgcctgtaacattagcatccagggtcccagcatatataataaggagcctaaaaatrtaataaatcctcatgaaaaagttcaaatgaagtcaatttgtgcaaattctcctataaaggcacaacaggatcaattacaagtaaaaaacaatataaaagcaagtcttcacaatgtcaaaagttccttacctctttttaatactaagtcctctacttctgtggggcagttgcagtctcctaccttgaattcayctatctrtatgcaaaagcaaggaaaaaatgaacatcttgcatttaataccaaatctaaggcttcaacagttggttcagaattggtacttgtttctaccaccgttccaactgttcatcatgtttctgatttggaaatgagctctactctggactgtttacctgtgttggctgattgggaggatgtggttttactgccagcatctcagcctgaggaaaacgtagactgtacagttcccattagtgactcagacttagagatttcatttaattctggagaaagattaatggttttgaaagaattggaaatgtcaagtcatgaaaactttggagacatagaggaaactcctcaaaaatctgagacttctaagtctattgtgtacaagagtcctcacactactatttataatgtaaaagaagccaaagatccaggttcagatatttctgcctttaagttacctgaacacaaatcaagtaccttcaacagagttaatgccaatatgtctcatcctttagttttggggaaacatcctcttctttcaggtggtaccaaaaggaatccatgcagtccccaagctttcccacyagcaaaaaaacaacccttcactattcatgaagaaaagcctacatcatctgattgctccccagtaagaagttcttcctggaggcgtctcccatctatattaacttctacagttaacctacaagagccatggaagagtgggaaaatgacacctccattatgcaagtgtggtcggagatctaagagacttgttgtttctaataatggacckaaccatggaaaagtcttctattgttgccctatcgggaaatacmaagaaaacagaaaatgttgtggttatttcaaatgggaacaaacacttcaaaaggaargagccaacagcatggttccatctcattccacagggggactcacttttagttctccagaaacaagccatatttgtgacagaaatttaagtatttccaccaaaaattctttgagactcaggccttcaatgaggaattgataacctttcatgtatgaatcctaattgttccttgaatttccaaacatgagtattctgataacatcttacactattttatttttattttatatattaatgtttactgcatttaccatactttcttcaggaaccacaagtgtaatcttttgtaaacagtatttattagattacatataataagcaacaatagtatatgatccttcttttatagttagaccttgaaacaagtctaaactatttttaaattatttgcaaaaaatgtgactaataaaaatccctagtctattttcaggtagattcttgtactttgagattatcataatcttctaactgatattttatatttttctaaaaacttttataagttctttagttttatttcaggcttgaacattggttctgatttgtatatcaacatatcagaagaattagtcaactaaagtttgaaaacctatgtagcagagatctggttcagaaactgcttctatactatacatttaaaaattaatcagcaattgatggtattatttttatattaagaaatgataggaacattgacactaatgtggaggaatttgccaaatattttatttcaaaatttagcctctgatatcataaccacaagatattttaaatcaacagtttctaagcatactaccacagtttttatgacctctccatcatcttgtggtttctagagattgacagatactatgtttgttttatagatatggtaattaatgaaacaactttaaattgtcttccattctttcttcctcagttcatttctttttgtcttcccwctgatagtctttggcagctcttgaataaattctacctgttggcatcaaggggaagaaaattagcctggaaatttttatctttacataaagccaattatatagcagtttgattatgaattctaggtggaagaattagaatagtctttggaatgggttttgggtaacagccaaaatagggaaaagggtattgttaggaaagttgtcttgatattaagtatttacygtgagtccagtaagccaaaggaccaaacaaaataggttcagggtttcattttaatctcaaagattctgattcttacccatatgtcatcagttcagtttgggacatgtggtgcagcatgtgtgaagaaaatattcattaaaatgtaaaaataaacacttgaaattgtccacaacactgagcaaatattcgttataattaggatgcctacctttctgggatatttgtaaggtgctgtagtttttttaacatgctcctgaatctcctttattagttgttcttgatcatgtgacttgtaatcaggatttagaacgacaaaagcctttactacctaaaataaatatttgaaacaccaggaaaatgagttatgcatttgtatgttttagtatgtcttgtttgcttgctctgagaatctacatgcctggtggggtgggccagtgtgttttaataaagtttgatcccagctctgtgctcttaagccagccacttcctggtctgtacctaatacaggagagcttctgggacccctgtaacaacccagcctcatccagcctagccctcagcatgggggattacttataaacagtagtcacgctgagtttgccatgtctttgttgaagggaacagttcacagagaacatgcagtctttatacaaggctgtgaagattccagcagctatttttttgttgctctgatccatttccatggccctgaggaacaagagtggaaatcatggtggcctttaactggcagaagccaagaaagatgttattactttatgcttacaaatcctcttctccaaattttatccttcctagaaatgtttttgaaaactctgcctagtttttggacctgtaatggagaagacagaaagataggccatccctcatagccccctttaaaagtaaatttggagtcctgtcattttctctcctagggcactaccaggactgccatttactgccttccctagaggcatgagtctaggtgcatcaactagtatgtacctccaacgccagattaccagcccggagctggctatggaatgatgcttccctgtaggcacagttccaggagagtcccctgaagcttttttatgattaagtatcctgcacttaggtgcctgaaatcttattaaattcaaggattcgtttgtccagcttaaagataagctggcaacatttcctatccactttgatctgggagtaaagatttcattgaaaaggaattatttgaaacaacaaattaccaggacagccatttggtgagaaacaaagacttgaagttataattttttcacatattgaaaactgttcaccagtgggcagttttacattgtatgaacaattacccatttttgtctttacccaaaacccttgtggccaggcacagtgggtcacgcctgtactgccaacatttgggaggccgaggtgggaggattgcttgagcccaggagttcgagagcagactgggcaacatagtgagactttgtctctaagaaaaaaaacaacaacaacacttgaacatttttaatttacatgtgccatgcggcagttgtgaacccttgtgtgtgtgtgtgtctatggatataattttgttccattcactttttgacattttataaaatgcatttgtagttatgctagctctgctgcattaacatttttacaaattaaaaaattatgcttgttgtaagtgagtcattcaaaggtaaattattttaaaaactgcaatactggttcacatattgacgatttctacaacttggatagtctcttttatctttttaaactactgcagaaaatgttaaattaacaaggaacaacctaacatgggtaagagtatgaactctgaagtcagaacagctgggttcaagtcacagtttgttgtgtaatgttggacaagttaggtaatctctttgtgcctcagtttccttctctgtaaaagagattatgatgattaaatgaattagcatagatgtataatgcctggcacatagtaagtcatcaaaaacattagctcttagttgtagtcttagaattacaagaagtttgggtcttattttttaacccagaatccataagtgggcttcaaatctctatgaaattctatgcaaaatcttgtatttttctgagaaaagtctatggctgtgccattcaatatgatagctgctagccacgtgtgtctatttcaatttaaatcaattaaaattaaataagattaaatactctcagtcacactagccacatttcaagtgattgatagccatgcatggctatcgcattggatggtgcaaatatagaacatttccatcactgcataagtcttaacagtggcctatggttttcttcacattctcaaagagatatgtgatcccaaaaatttaagaacctagtgatctagacacatattccacaagtctttcacattccaatgttaaaatggtatttcaaatccaaatattctttttaatcaattctggaacttgctacccaattaccctgcctggcaggacccagcctagagaaggacctaacccaggtagaataggcctggcagcagaaagggaggcatggagcacatggccgttttgttcatggatacctcgtttgagatacccactcacatcttctactaggaaatgctgcagcctaccactgttggaaaactggccacactttccccctcactctgactaatccaagccctatgccaagcccccggagctgtgaggggaccacaacccacttatagacctttcctatattgtacgctaggatatcaggtggctgccaagctaaccctgttccgaaaggctcagctaccatcctgtccctagtaagcacctgtctaggtgggtaaaactgatgatgactaatggtaggggagaagtacaggaagagctaagactcgtgaaaccttgccgatgatgttcagagcaaagagacaagccaataatcactgactgttttccctgccctcagctgcctggaatataccctttcacagtaaatagcgattgtcatcctagcaacttgacaaactaccaattcccagccactgggctatatctggaacaactttgggccatccaggaggacttaacagggtatcttctggcatcaaagatcagttaggggaatcagtcctggggggagatccaccctccactgtaacatgcacatctcctatttttaccttaaacttttttatttttatttttatttttttgaggcggagtcttgttctgttagccaggctggagcacagtggcacgatcttggctcactgtaacctccccgtcccgggtccaagtgattcttctgcctcagattcccaagtagcagggattacaggcgtgtgccaccatgcctggctaatttttgtatttttagtggagacagggtttcaccatgttgaccaggcttgtctcaaactcctgacctcaggtgatccacccacctcagcctcccaaagtgctaggattacaggtgtgagccactgtgcctggcctgccttaaacttcaggacctatttcrtcccctgagattggataccttctaactctgccctgtgccctgtgcttgaagccctatacctaggatttgagataaggagcttgaatacatggtacagaaagttctggatttgtattgacatcagtgtcatcttcaaaacttggattcagtgttagaagggatatggcttgaagaaatacttgtgagaacttgtaactcagctagagaaaccctaggggcatgttgtagacacacaggcaaaacgcaggaggctgcctggcatggtacttttaagccaaaatactgtgtggtcagccccaataggaatgggctttcaggacacctgtgttattcagagtttatttcctgaaatctctacttatttacctaccaagactgcttatggttacctcagttccagcctctggttcccacttctgacatctgatgccagcccattctccttcactacaccagggacctcgttggtttccagaccttctgggtaacaatttgatcccatccagctgacttctgtcaccccatcctgacgtgagcctgggttactggcattcacaccatctttgccctagtccaccacggaaggaattcaaattctttctagtacgtattttcagccttattttgtttgtctgttaggatcagagctgcaactcataattcaatcttattttgtagcagttctttctgactagcatatttctatctgacttgcatatttagtaaatgaatcatttggttaattctgtttcactgagctactgtttgtaagtatgtgttaaattgccaacaaattataaagttgacatgaatcagttcttttacctctcctctgatggggtctgggctgctgacaacagctgactctgcaactgaagggtgttcattcagggcattttctacctcaaatggtccaattcgatagctagaaacacatatggcaggaatacatacaggtgagtggcaggttcactctagaacactgatgatcagttaacacagacatatgcacatatggaaaagaaagttacccagaggataatatracatcatctgctcttgcaacaaaccagaaatacccatctttatccatatatsctctgtccccagtgatatagaaattgcctcgtagagttgaagctgtttttgaaggattatcctgcaaaacaaatagcattttgttgttatggtgaatccaactcttctggtcaattggaatttttttttttttttccgagacagtctcactctgttacccaggctggagtgcagtagtacgatcttggcttactgcaacctctgcctcccaggttcaagcgattctcctgcctcagccttccaaatagctgggactatagacgtgcaccaccacacccggctaatttttgtattttttggttgagatggagtttccccatgttggccaggctggtgtcgagctccttacctcaagtgatccgcccaccttggcctcccaaagtgctgagattacaggcataagccaccgctcctggccctcaattggatttttaaatgttcaaggaagcagaaaagtttggctcctttgagaagcattagagttaggaagagatagattgtgaaaataaagatgaaattccagcatggagctagcccgacagaagaaaggtaaactacagttacaaagattagtcatgtttccatcttgagatttttcttagatagattacaaaataaatattgcagtagctcagaggagtaaactaaattaagtcttttgctaattgattaatagataatgctggtaggaaaagagagaagtaaatactcaagagtcaaaagaaagcactgacacctaataaagagcagacaggtttgttttgtttttgtgctttgttttgttttacacaataatagaattggttctgcaagtctgacataagaaaaaacaagatactgttacattatatcaaatacactggcaagtagcatctggatcttttattatatgatagagactttgctctaatttgtatactgtgattagagatgaaaatattgttgtaaacagtaaggagcttagaaagcctcttgtgaaagacatttgcttaatcccaccacccccgcatcccctgtccctctcactcttcccgaaaagaaagagcactaactggatttcaggaaaatgagtgggttttgtttgataattgagaggatcaggggatgttaagaggctgtcctctttctagggtcccttcctcttgccttcgtggacctggaacagtgatctggcctcaggggaccagcatgcttttcttcagcaagaatttgrgtatttcttcaatttcttgtcttttggattactattcaggacaaccaatctctcaagaaagggtcaagtacctatcctaggtatgttttgtggcaaacagggattgttaccaagcacttgagaaataaatagaaaatgagattatttagtaagtcacttactacstaatgagtaaaaaggccaaatggtcggttgggtagaacttgaatgccaatatctccttcttgtccaggaggtagaacattgccatttacatctacaatctaggataaaatagaacaatttatttaaggaaatttttgtttaatgtcgcagcttaaatattaactttgcaagttttattttggcttttgccatttaaaaatgaagacttaaaaaaaattttgtgtgtgtgagacaaggtctcactttgtcacccaggctggagtgcagtggtgcaatcatagctcatagctcactgcagsgtcaaacttctggtctcaaacagtcctcacacctcagcttcccaagtatctggggctacaagcacatgtcattatgctcagctaatgtttatttttattttttgtagggatgagggactcattatgttgcccaggctggttcctggcttccagtgatattccagccttggcctcccaaagtgctgggattataggcatgagccactgcacctggcccaaaaatattttaaatatactttaaattcctaagagaaatatatttacttaaattcttattgcataaaatattaaatacaggttaccaacatgtgaacgcaggataaaattttttaaaaattttaccatccagcaataatcacattttggtaatatcctttgagacaatatagataaatcgaaaaataggattgctggctgggcgcagtggctcatgcctgtaatcctagcactttgggaggccgaggcgggtggatcgcctgaggtcaggagttcaagaccagcctgagcaacatggtgaaaccccatctctactaaaaatagaaaaattagccaggcatggtggtgggcacctgtaatcccagccacttgggaggttgagcaggagaattgcttgaacccgggatggggaggttgcagtgagccgagatcactccagcctgggcaatgagtgaaactccatctcaaaaaaaaaaaaaaaaaaagaaaaatagagttgctttataatatacagttttgccaacctgcttttatcatttagcaataggtcttgattatcttttcctcttgataaataaatatcttcattactggttttcaaactttgtttagctgtggaacctacagaaccttacttcagaagcccaatatgagtaaacaggaaaaggggaatattctctggttgacaatggtaagtaagccacagccttgctctcttaccctctctccaatcctcatcattccctgaagtgtctaccagtagctagcatttattaagtacttaatacatgctaagtaattaatgctaaacctttaagtacttgacatgtacctattcctcactgtagccctatgtggttagaatttttatgcccatttgacacatgaggaaactgaggtgtagagagtttaacactgtgcatgattgagctggaatccaaatctcaccacttacactccagatcatatgcttttaatcattacactcctctgtgcaatgcctctagagagtttaatccaattaaaaaaatcagattagcatttctcaagttgattgctgattttatacatcagattttgctctaaatgacttttagctgtttctaagtatcaaaattctgcttttatatatattctccagataccttcaaacctgaggtgtggcctgcatggagaataagtataatacttatctagcactttccaaaaggaaaggggcttatgtgctgaatgagaaacttaaatggcaaaggaattctaagcgtaaaaacttctctttaagctcttgcaaataaaaaaatataaattcccacccagttatctaaagaaatatgtggttccaggtatgaaggaattattgatggaaaggaagtattttaaaagttccagttacttacagattttaatagatgggaatatagataaaatcttctgtgtctggggagaatcatgttcctcattgttcatagggtcttaaaatgtttaaacatgaaaattatgagtatttaaaagcaaacaaagaagattataaaggttgggctttgaagttgtaggaatctgatattcacctggttggaacacatccccagatgccagaatgttactgcagatgcccttagctaaggaacaaraagccccataataacggcccgtggaaaagagttaaaaatgactggggatgcagrmaaagtactgttttcctctcagcctcatcatatttgcattcaaagatagctgctctagaaaaccactgggctcaaattaatggggagcaggtgggggtaccttgcagttgggatcactgtgaatacagctgtgcctgtaagaccctgatagccatgcatgttgggaattgctattaaggaaggaagaaaaagaacatagctgtgttacatatcaacttccctgtaatgcagacatgagtgtgcttaattatcaatatttctttcttcaacctaaggtagcctgttaaccaacaaactattgttaagcctgtttgggctctcctaccattttttcttagataagcttttcaaagaggaatgtgaaaaaataaaaaaataaataaataaataaaaagaggaatgtgagggagaagtaaataacagtacccatcttttggacctttattatgtactaagcattctgatatgctctttaaacatattgtctcctttaatcaccacaagaaacctatgaaatcagttctgttattatttggtttaccaaccatctgagactgaagtggtgaggggttgtcggggggtggttcttcaggatgtattgccttaagtgctaaaaccagataagtcccaggcaaacagacaggttggtcactctagtcccaactttacaaattaggaaactggaacttacagagctttaacagtgtacccacagacactcagacagtgaatagcagagatatagttgaaccactaggctatcctatcttgagaccaggtttccacagcaaggttaaagtgagagaaaggacccaggatctggtttattctataaagagttacagcagcaatcaagctcatctaaactctctcaaacttayttgatcctaaaaactacttggggggtgcttgttaaaatcacaagatttcaaatttcagagttccactccaaatctattgaattggtctctccaggggcctgagaattagtatttttaacagatatccatatgatgtttatgatcaaacaagcttgggaaacatttatctaagagctgtactctgttaattcatccatatttttgctgcttttgctgtctcttaacgtacagatgggtctctgaattaaaatggttcgaacttactatttcccaactttacaatgggtgaaaaagataaccattcagttgaaaccatctttctctctagatgctgggcagcaacagtaagtcacagctcccagtcagccatgcatttgtgacttaggatgttttcaacttatgatgacttattattttgggacataaccctatcataagttgaggagtgtccaaattagtgttaagttcctttggctacayccagctttgaagctcggttgatctgagaacaattttaaccctatataaagcttgctgatggggaactggaattccccctaggcatcaggtggtagtagtggcagtggatacagagaggctggaaatggccaggcaggcttgggagcagagagggaaagtgctgcagccactgtaaactgaagcctcttcgggcctagttgaccygctcagaaggtcttgacctcccttgcctgmgaggaccagtgttgtgttgtggttaagagtgcagatattggagccagactgcttgggattgaatcccaactctagcagctattagctgtgtgacttctggtgagttcttttacctctttgtgccttgtttgtaaaatggttctaatattagtatgcttctcatagggtttcttctggaaattcaatgggttaatatttatttatttagagacagggtcttgctctgtggcccaggttagagtgcagtggtgtgatcatggctcactgcagccccaagctcccaggctcaagcaatcctcccatctcagccttctgagtagctgggaccacaggcacgtaccaccatgcctggctagttttttatatttttttgtagagacaaagtctcacgttgttgcccaggctggtcttgaactcctgggctcaagtgatgctcccgccttggcctcccaaagtgttgggattacaggcgtgagccactgcatccagcctaatgggttaacgtttattaaatgcttagaactgtatggtacaatatgggtatttgcaaaataatggagaccaagaagctaacatttctaatcattttcacatatttataaaaattaaagtatcatggaagtaaaatggaatcaccatcataacaaagaaagtttatatgggggtaagcggtaggtaggtagtgtacagattgggttgttaaacattctcctggaaggggatgtgcaaaccttaacatcraaagcaggagaaggttttcccattgagccaggtttaattttcattcccttaaaatttccacagattagcacctagttaagaagaagaaaaagtaagataacattacaagtcacttaaaatttattcatctatcatgcattcattcaacaaattatttattgaaaacttactatgaactaggctcaaaatgaatgctatactctcatggaatgtagtgataacatataaatacatgcatatgtataaaatatagttataacaataattactcatatatccrtatttatcaaaacatgagtatattaacatttgcatttatattagcatacttgttatgctatttctagttaatgaatttttcaatttttgatttttatttttgatattttcattttttaccaggtgatacattctcatggttcataaattgaagcattataaagacacattgtgaaaagttttttcaacttttcccttatctatttcatcttactcctccctcttctacaaaataaccactgttgttcttttttcttatttcattttttgttcttatttcattttttgttcttatttcattcatttcctctagaatttcttattccttatctctatgagctctttaaaaaatcctttttagagtatggttgctaaggagttgtccagcaaactcttaatatttcaggcagcaaggatctcagcattttccattttgaggcagccctaaataagatacttccctatcacactgggaggaattctttctttcagtagatccagtattatttcatttaaaaaaatattgtaatgcccttactctgatccattaacagtggtgtttgtcaatgaatggctatttaaacaactatctgttaacagagcttttttgcaattaggttcttgcaagcattgtttttttaaacattttctaaccactcaactcctatccctcaaataatcatraggagactgtggacactttggtttttattcatctgactaaatggaatccagctatgtcttttcagtgaggtcaggtaccgtttcagtctgtccatatccttcgtagatatccaggcccgtsttgtttctccatttttcagtcacgtcaggggtaattggttccccagcactcacacagtgctttaagcttttaaacttatagcttctcagaaaaccagrtaagttagatttaggaggaaaaatggagagaagtgaagattaaggattatttcttatgaacttcaatataaaatgttttagtcgctttttaattcctctccctagcacaaaacaaaccattttaccccataaacatatacaactactaagtacctacacaaattaaaaataaagatattaaaaagataaatcattctaatatcatagaatgatactagaataccccaaatactagtttttctttacccccctttttgtggtggaggtataatttattacaaagaaggtcattctgttcttagggaaggtaccccataataacattttattttattttgtttttatttttatgttttcatggaatgcttcaaaaatttgcatgtcatccttgtgcaggggccatgctaatctgctctgtatcattccaattttagtgtatgtactgctgaagtgagcaccataataacactttaaatcagcaatgaaaagtaccaattgtttggtaaaactgatggtgggatatttatacaatggaatactatacagctatgaaaaatgaggaagctcttggacagtgctgcccagtagaactttctgttatatggaagtactctgtaatctgctgtacccactacagtatatgctagccctatatggatattgaacactagaaacaggactagtataactgaggaattgaatttttaattttacttaatatttatattgaaataactagctgtggttagtggctaccatattgcacaacacagtgccagaatgtattgttagaggaaaaaagcaaggtgcagaactgtgtgaatcttgtgataccatttatgtttataatagagaaggaaaggccaggtgtggtggcttacacctgtaatcccagcactttgggagttagaggtgggcggatcacctgacatcaggagttcgagacctgcctggccaacgtggcagaaccccatctccactaaaaatacaaaaagtagccaggcatggtggtgcacacctgtaatcctacatgctcaggaggctgaggcaggagaattgcttgaacaggaggcggaggttgcagtgagccgagattgtgccactgcactccagcctgggcaacagagcaagactccgtctcaaaaaaaaaaaaaattgagacggggagaacacatgtgtatcagtttgtgtattttcagggagaatagacaagaaactggaaactcagtttgcctccatggaagaggactgggtcactggggacaaggtttgaagcaagacttttcactatgtatttttatataccytttgaattttatggcaggtgaattatttcctattcgataattaaataacatcagtttaaatatatttacctgtgatatgagctataacaagaaatacatagatgttgagtatccttaatctgaaaattcaaaatccaaagtgctccaaaatctgaaacttttttagtaccaacatgatgctcaaaggaaatgctcattggaggatttcaggtttcatgtttttggattagggcagcccaaccagtataatgcaaatattccaaaatccaaaacaatctgaaatccaaaagacttctggtctcaagcattttggataagggatactcaacctgtactgagtcttcatcctgggttcctggcccagagcttctaaaacctttgtaatttcccaagtgatgggtgtgctaggagtatcttttgttctaatattttgcctttgactctagtttctgatacagagcttctaaattccatggaatttccwgggtaatagaattgtcttttgttctcatgaggcgactctcaatggggctcccgtataggggttggtcacaagaaagactaagccaggaacagaagcttggcactttcagcctcacctccatccttcagggaaaggagaggagctggagattgacttaataatcaatcatgcctacataatggagcctccaaaaaaatccctgaagtatgaggtttggagagcaccacgtgccggaaaggtagtgcacccccactccacagggatagaagctgctgcacttgggaccttgtggacctcaccctatgtacctcttcatctggctagctattcatctgtaacttttatcatatcttttataataagctgggaaatgtaagtaagtgttttcttgcactctgtgagccatcatagcaaattactaaacccaaggaagggtcatgggaacctctgatttgtagccatttggtcatatgcgcaggtgacagcctggacttgtgattagcatttgagatgggaaagagtcttgtgggactgagtcattaacctgtgggatatgatgctgcctccacggagataatgtcagactgaattaaatcataggatactcaactgatgttggagaattggtcaatgtgggggaaaagatcccttacatctggagacccagagtattgagtgttgtgaatatagtaaaatagtggttgctgggagttgagttatgaggatgcaatagcgtaagaatgatataatggactttggggactctggggaaagggtgggaggtgggtgagggataaaagactatacattgagtacagtgtatactgcttgggtgatgggagcaccaaaatctcagaagtcaccactaaagaacttattcatgtaaccaaacaccacctgtttcccaaaaccctattgaaacaaaacaaaacaaaacaaaaacaaaaacaaaacaaagagaaacgggggttgtttttctttttggattaccaatgaaccctttcaaatggaatcagcaatagaataaaagatatgcatcctcttttctatctgctgggataaggttccaaatagaaacaagttctctactttctcagctcagagaaagccatcatccaaaagatttaccatcttcttacccataaccactgggcttagagctataaacatagctgaaccctcactttcttcttgtttgggggatcttgccctggtcacagtaattatcatttacagaatgcaggcaagaaggagaaagaggaagaggagagattgctaaatcctgtgtctactggcttggagctatgtttcaggcagaaagatcttttattttatagcttcctcttctcccctctccccactagatgccwatttactaacatttcttacctggttatatcattctgtacaagcattcggtatacagttggtgctgaacagaagactgtgatggggtacttggagagtgtctgcaatttagaaaaagcaaactcttggtcttactacaacttaaataagtgcttaaatgtctttggttgacgcagcacaatttaaacattgtttatgttaatgtaaatacattctkaccttttcttgtagaatcatccctcagtgtctgcaggattggttccaggaatgcttaagtcccttatataaaattgtatggtatttgcatataacctatgcatatcctcccgtatactttaaatcatctctagattatttatactgcctaaaacaatgtaaatgctatgtatatatttgttacatggtattttttatttgcatttttttaattgttgtattttgtttttggtttttctccccaaatattttcaatatgtgcctggcagaatcagaggctgcagaacctgtggatacagagggggccgagtgtatcttttcaggcttattgactttctggatgtgacatatcttaaatcatattgtctactctgatctctgcaagttgctttattcaccagttctgtcagccatactgcttaatgcatttctaaatattgacctctttgtgctttggcttacttgcaagatagaagtcggctcaaaacggggtaaatggtgtgtgaatacacatgctccctggatcyacggagaaaaaacactactccatgcagactttgcccagcccgtatctgaggtattccacatcacatctgagggtgtcaaatctagccagaacctgggaaaacaaagagtagccctgatgtacataggaaaataaatataaaagaccagtacataagtcatcatctttgcagttttgacacttcaagctgcacttttgtgraagtataccttccatttacagataatcctaaaccaaaactgctgtgggtgtgtgcagtcattttcggatatccacttgttccactggtaaagaatatggccatgatctcattgtgttttgtcttcacacaggtgtggctgtcactggcatgtctgcaaaggaaaaactacaatgactgcatgttaaacacagcatcacagactgttaccactgaaaaattttgagaagctctccacttgaacctcttcatgtcatgaatcaggtgccagtggcttagcttgaattacagggtaaaagccatcactttctctatccttttaggtgctttctagaatcaaaactaaactttgtcatcaaaggcccatttataatagctgctttcctagctttttattctatgataaagaaggattgaagcatttttaaaacttgagatttttatcatacctccagcagagtaaggagtctgtgtgatcttgcaatcatggataaggaagaattttccccttccctcccctatggatgctttaaaatgtgattttttaaaaatgagtatgttaatacaatacatgttagtaaaagccatgggtactgatgggccaacacactacagcctactggcaaaatctgacttgcctcttgtttctgtaaataaaatgttattgcccattcattgaggtagtacctgtggttgctttcacactacagtggcagagttgagtagttgtgatgagactgactatacggcctgcaagccttaagtatttattctctgtcccttttacagaaaatgtttgctgaggctgggcatggtggctcacgcctgtaatcccagcactttgggaagctgaagcgggtgaatcacctgaggtcaggagttcgagaccagcctggccaacatggcgaaactctgtctctactgaaaatacaaaaattagccaggcacagtggcacatacctgtaatcccagctactcaggaggctgagaatcgcttgaaccagggaggtggaggttgcagtgagccaagatcgagccaccgtactccagcctgggtgacagagaaagactctgtctcaaaaaaaaaaaaaaaaragtttgctgaccgtgaaaggttggcttttctgtttcccacaagagagtctacatagttctggatatagcagacaataagattgaacaggatctaagcatccatccagggaagaaagagttccagttaaagagaaagaaaaccttttagttccaaaggataatcagacttctatacaagtcacacattagggcagctgcacacatacatatcaagtgtctaagatgcacacagacttatccaggcatgtggggttgagaatgagtagaaacaaccaggccattcatgagaaatatagaaaagctattttcttttctttcttttcttttcttttctttttttttttttgagacagggtttctctctctctcacccaggctggagtgcagtggctcagtcatggctcattgcagccatgacctcctgggttcaagcgatcttcctacctcagcctcccgagtaggctgggactacaggtatgcatcaccatgcctggctaattatttttatttatatagagaagaggtttcactgtgtttcccaagctggtcttgaactcctggactcaaaccatcatcccacctcagcctcctaaagtgatgatttataggcatcagccactgcgcctggctaaaaagctgttttcaaaatctgacaaagctacaccaagtgttcagtctatgatttcataattatcttaattaattaaaaatactatctataggccgggcgcagtggctcacgcctgtaatcccagcactttgggaggctgagacgggcagatcatgaagtcaggagattgagaccatcctggctaacatgacgaaaccccatatctgctaaaaatacaaaaagattaggtgggcatagtggcatgtgcctgtaatcccaactacttggaaggctgaggcaggagaatcgcttgaactcgggaggtggaggttgcagtgagccgagattgcgccactacactccagcctgggtgacagagtgagactccgtctaaaaaaaaaaaagtatctatagctgtgttcctatcacttccatcaccaatacggttgccctcaaaacctgaggaagggttgttgtactgatctcttactagaggcagtacatacagaagtgaggagtgtaggctcagcacccatactgcctgggtttgaaacttagctctgccagatactagcatttgaccttattcagctgtgtaattatagtacctaggttgctgtgaggtttaaatgaggtaatatatctgaagtccttagaatagtttctggcacataaccgtatcaatataagctatgattgcaattataacattatttttattagaaccgtacttggcctttggcaagaactcaatattaggaattttaaatgtggtaggaaaagtccatagttgcaagcatgctcccaaatccttgagtaaaggtaggaagctcattctagagaaggactttgctgccagcccaattctaaggcataaccagtacctggcaagagttccaagtaacccatggaaacaccccatgctaggcttcaacatcagtgaaattcacttttataattgcatccattaacattaagcattttttcttttaacctgataccagtgttgctgtcagcaagggaatgggatagccaacactgaaggactgactgtgatccttcagtgacaggtgctgggagcactctctagagattgccttgactgaagacagtggctttgttaaaggtcttgactcctagggacaaccccatccaattactgatcaatgtgggtatataaaggccaggacctcttgctttagctgggaacagctttgaggaggtccttcagaggtcccagtgggttgactgaaagctttgtagggaatacatcgcaaataaatttctttctctgcccagtccgacattcttactcattcctcacaggtgttaatcccaaaagaactccttaataaacttcctatacaccaatctccaatctcaggggatcccaacctacaaaaagcactccaagctccttcctacttcagagtttagcactattagtgcagcaataactaccaactgttccctttgcctgttgttttaatttgcatttttctaatcactgctgggtttaatatctttttattgttgcctttccttttgggaagctgttttacaacaagtgtggctactcacttcatcaactccttgaggttcccccacccctctctggagttctctgatacratcagcttggagtgcagattttcacatttggatgcaacagcgtctactgctggggctaaaacatcattggtgataatgcagtttgcttttgaagattgtagtctgtagagaatgtctttctgggtcagctgagtggttcctggaattaaaactgtccctaaaggggcagaaaagaaacagtgtttagaagaaatgttattcttcattatgttagagtagtgtagataccatctatacattctgtatttctcagagtgagttaktcagtttaccaggaagatatctatttatcttgctttcacttatctgcttttgcctttcaagggatttcagagtctatgacccttttggcttaacatgaaagcatgttaaatactggataattattctttatttgaagaccatccctaacattgagcttgaagaaggttttgattgaaaagtaatattaaccaatatttattgagtatttgattatatgttttaacttattcagtccccaccaaaaaaaccccaaaacataaaagctatgaataacttgcccaaggtatcacttaagtagtaagtgacagtgcagggattgaaccctgtagcctgactccagaactgtacacttcaccacatcagctgagtgcctcttaaaatgtacatgattgctttatgatttctttccaaaaggaagtgtggaggcattcatcttttctgtggttctattcctgctggttatatattacactgtaagatgaagtataatgattaagagtgtcctggagccagacactcttatagctgggacttgggacaagccacttcacctctgtgagcttcaggttctgcatctgtaaagtgatattgtaataatactacttcttttataggataattaggggattaaatgagttaaaatatgtaaagaacttagaacagtgctcagtaagctttgggtattattttctcaaaggataaatggactctcaaaaatatatagatcttcctcctgggccccaccacccttaagtcccagacccttaagacagggatggaaagcattcacttcacaataggttttactcttcccaggcgacacagtaggcaagaagattggggaacacatgtctggcattcctggactcttgacactggctcatcctttcactttgggaaggaccaggcctctccatcagggttcttcaagaaaccaacaaccaggaccagaacacaggttctttagaatatcttttctttctaatcagggcaacacaacaatttttgtgaggctgtaactctaagattatcttttaaagatgttccacctagggataaggaattagcctaccacggcctaacttttatataatttaaaggcactctttgacaataagcccacaacaaaataaatgtatcatgattacttaggtgttctggaaaatctcccctccagcttagtaataaatatgatcggaaagcaaacattactaacctgttcgcagacaggccacatttgcaagccaccactctgggaccctgggcagaatcagaattacccgatctcctctttgtagggaacaggcttctgaaagtatattggcaaattttctggacagagatcccrgttcctcaaaactccatcgcatctcttctccatttctgttgatccaccagaaggctggatttgaaggtttctttccagcctgaggaaagaaaaaccagtcattgatttaaaggttgttatacagctaaattctgggccaactgactcaatggaatagattagctgaagaaagttcgcaagtcattagttagaacatggatggagaatttggaaataactctgggggagacatcatcaagatggatgactagagatgcccagtactcacctcctaccagaagtaccaagacagtaagcagataacatgacaaatagagtgtcaaagggagaacactggaatttagcaaggaagtgacaaaactctctgagacctgaaaactagagatgaaagcatagagagggaagaagagcagctggccaggatcagcacagagcccagagggactccctattttgaggaaaatgtaagtggaagatcctcagcagtacacattcccatcacagatgcctgaagtcccacctacaggagagcccctcagccctcacatgccctgagcctagtaaacgctgtatagtatagtatactagtatagtataacattgttccagagaggaagttcatactaggtcctcctgcaacaaaccccaggacccgagctgctatagcatggcatcattttaggaacagagctactaccatactacatcttgccctggggccaattgcccctgcatctccacatccctggggccttgctgacatccccacacgttcccgtagagggctgcagcattccaacaccaggtggatccagtgatagarccaggccactggcacccgagcctacacacagcactctacaccccaggtaacagggagtccagcacatcaagagaggctgccccaggacataaggcactaaagcacactccccagagcctgagagctgccttcctgagcctgctgccatgaacatgatcttgccccctctagtggcagagccgctttgtgcctgcattgccatctgcggacccaaggactggcccattcaggctgccactactacaagtacccatgtgcactgccaaaggacctgaggtctgactcacttgaggcttaccactgctactgccagtgcccatgcacacttcctgggagcctgaggatcagcctgcctgggacccactggagccactgctggcacccttatgatgaacaaaataacacctatcaataacaatcttgaatgtaaacagtttaaattccccagttaaaagatatggactgtatggactgactaaatggataaaaaacaagacccaactataggctgcctacaagaaactcacttcacctgtaaagatacacatagatagggccaggcgcagtggctcatgcctgtaatcccagcactttgggaggccaaggcgggcggatcacgaagtcaagaaatcgagaccatcctggccaacatggggaaaccccgtctctataaaaaatacaaacattagctgggcatgatagcgtgcaccttgtagtcccagctacttgggaggctgaggcaggagaatcgcttgaacccgggaggcggaggttgcagtgagctgagatcgtgccactgcactccagcctggtgacagagtgagacgctgtctcaaaaaaaaaaaaaaaaaaaaagacacagaaaatgaagagatggaaaataatatttcaaacaaataga

SEQ ID NO: 8808 - DNA, 16213 bp, Homo sapiens
atgtttatatatggaaaagctttaattaattggtttaacaataagaattgcttaaatcaaacattttatcagaaaagtaaaaagtggaataccctttatttagttcatgtgacttaagtaatctttgggaaataaatacagttttaaagattattggtaaaataaaaaatcttcaaaaatgtaaacattttgtccgggtgcggtggctcatgcttgtaatctcagcactttgggaggccaaggcgggcagatcatttgagctcaggatttcgagaccagcctggccaacatggtgaaaccccatctctactaaaaatacaaaaattaggtgtagtggtgcaagcctgtagtcccagctacttgggaggctgagggaggagaattgcttgaacccgggaggcagaggctgcagtgagccgagattgagcgactgcactccagcctgggtgatggagcgagactctgactaaaaagaaacaaacaaacaaacaaaaaaaaatgtaaacatttggtctaaattatacaggtcagatattaagtttgctaaattctttaaggtcataagctgcttctttgactattaaaaattgttcaattttaggctgggtgcagtagctcacgcctgtaattccagcactttgggaggctgaggcaggcagatcacaaggtcaggagttcaagactaacctggccaacatggtgaaaccccatctctactaaaaataccaaaaaattagccaggcatggtggtgcgcacctgtaattccagctactcaggaggctgaggcagtagaatcacttgaacccaggaggcagaggttgcagtgagccgagatcatgccattgcactccagcctgggcaacagagggagactctgtcttaaaaaaacaaaaaaacccaaaaaacaaaaaacaacaacaacaaaaaaaattgttcagtttatctactttggagcattagattaaatgtgttattggtacatgttccaaaattatgagaaattcctataattctaatatgacttagcgtatgttattaataattgttacataaaattttgtatgcaacagaagtaaccaaaatttcctagttaattgtggctttactagtggctgtcctaagactttttttttttttttttttgagacagattcttgctctgtcacccaggctggagtgcagtggcacgatctcagctcactgcaacctctgcctcctgggttcaagcacttcctctgcttcagcctcctgagtagctgggattatgggcacctgccctatgcggctaatttttggatttttggtggtgacggggtttcaccatgttggccaggctggtctcaaactcctgacctcaaatgttccacctgcctccgcctcccaaagtgctgggattacagatgtgaaccactgcgcctggccctaagactttttatcatccacagacaattgttgtcttgttttgatcttctttagaaggtagtttataatcagccataggactttaacaggtgcacttaaatgcaggtttctgataactttggagattgtgacattagaatagaggaaacaactttcagaactctcatggggagctgaaatgttcatagatatcaaacaaaagttaactgcataaactaaagaagactaaagcaatctttttgcctttgcttaaaacattgctgatcctttgttttattttttagagtcaaggcaacttttcttttcagatatttacagcttttaataatcgagtaaagtatactcctgtgaacaaaatttggagtatatgcatctctctacttgatttctccagaatttggaaattatttgtgtgtattcttaatttatggcaatgcagttatttgcataagggtaataagaatctgttttcttttgcaacaggacacaattggagaaattgtttattttatgaagggtttgactggaatggtgtgctttccattaaggaatcaaacttgacttgtaaagcctataaaagccacttagcgacctgggctcataaccttgcctacacagtccctgtacagggtttctgacctgtggtaagtaaagaatgtcaccttctaaaaggtccaggagccccaagttatctggggacctcaaaaggagaggaagaatttacccaactcaaaggtatttgagggcacaaacccatggcagggctcagctttaaaaagtcttatccaagattctttctatggaacagagttccatcaaagccaattttaaaagcctacgtgaaaaataattattcttgctgcactttatacaatcatcaggccaagtataataaagcacattggtcttaccataaaaatggtctttcataaaaatgggaaactggagagagaaaaattatgtttcaagaactatgatacacttgttattaaattccagtctcatcagttgtctttaagtttgtttctgcaatttaggctaaccctgcttagtcctgtgaaccaaccagtggcctctgactgctgctcagaagaaacaagagggatgggtaatgtaaaaatctgcatcaatattctaattctgggcatgtactggaatcatctagcaacctcatatcagcgtggttccaacagttcctcagttcatggaaagccttctagtttagtttacttgggataattttacttattttgctttatggttgtggaatgtatagctgttgtaatctttgtataggaatggaggacaagcttactgaatgtttccttaaactgaacacttatgaatcttccagagtatcaccttttgtcagaactcatgagttatgaatggccctcaagataccaatgctttttcttcccttcccttcccttcccttcttttcttttctttcagatggagtttcattctttcaggctggagtgcaatggcacagtcttggctcactgcaacctccgcctcccaggttcaagagattctcctgcctcagcctcctgagtagctagggttacaggcacccgccaccacatctggctattttttttgtattttttagtagagacagtgttgcaccatgttggccaggctggtctgaactcctgacctcaggtgatccgcctgcctcagcctcccaaagtgttgggattacaggcatgagccatcccgcctggcccataccaacactttccaactgagctcctctctaccacgaatatgagagattctaagagttaggcaaaaatatcatcgcccctattcatcctgaagaacttacagaagatggaccttcgtccctctgcaacccttaggattagtgcttctcttataaaaggaaggggggaaatgtcagaggcacgtgaaccagagcaagtctattttgaacaagagctgagtaaaatgagaatgagacttactgggctgcattcccagatggttaaagcattctaagttacagaatgagataggaggttgccataagatacaggtcatggccgggcatggtggctcatgccatgacagtttataaatgccatgacaatgacaggaagttaccctatatggtctaaaaaggggaggcatgaataatccacctcttgtttagcatatcatcaagaaacaaccataaacatgggcaaccagcagccctcggggctgctctgtctatggagtagccattgttttattcctttactttcctaataaacttgctttcactttactctatggactcgccctgaattctttttttcttttttttgaggcggagtctcgttctgtcacccaggctggagtgcagtggtgcgatctcggctcactgcaacctccacctcccgggttcatgccattctcctgcctcagcctcccaagtagctgggactacaggcgcccaccaccatgcccggctaatttttttgtatttttaatggagacggggtttcaccatgttagccaggatggtctcaatctcctgactttgtgatcccgccttggcctcccaaagtgctaggattacaggcatgagccgccgcactcagcctgaattatttctagtgtgagatccaagaaccctctcttgggatctggattcagacccctttcctgtaacaagattaggcaccaggagaaactgacacacatggatgatataacagatgcctaaatggatcctatgggggaactggagctggaacagccctttagagttgtcgcaaagtgaggcaaagaggctagacttttatatccctccatcaatcagtgtttgacatgggccccataggagggcatgtaaccttcggtgaggcatctttctgacttgaagggcattgcccaatgagggaggtagctatgtggtatcagcagctggtatttcctacatgtagcgaatgggcatattggctcccaagggggaatctgggtggagcactatagtatccattaaacctagtaaagaaatattatttctttactagtcacacagatgtgcccaggacagtggtagagcccacagggttacataaatcataatggtagccctcaagaacttcataaactgtatatggtattttaaaaagttgcatattgtctgtttccacctactagaacataagctctagaagggcagagactatgttttgttcaccactgtttctccagtgtctagacgtagattctttgaatgcatttaattggagccttgagatatgaagaagtaggatgcggttacttcatgcagagcaagagtagcatgcacccagagaaggccaggtggaactcagcatgagtgtgaaggcctcatgtcaagccatgtcaggggacacaaagatggagtattctctaacctatgtgacactcggcataagggaagtacaagcactcaatatgtgagtttcattcccacagtctgtggtctttagcccagtctttccagatgcctattgagttcttcaagcatccaaatggtttggggaaaggcttcaggttctaaatgagaggctttgtgggttaccagctggagagtcagaaaatctggatttgaattcactcagccatgaaataattgtgtgatcttgggccgggcacggtggctcacgcttgtaatcccagcactttgggaggccaaggaaggtgaatcactagaggtcaggagtttgagaccagcctggccaacatggtgaaaccccgtcttttttttttttttttttttttttttgagacaaagtctcgctctgttgccaggctggagtgcagtggcacaatctcggctcactgcaacctccgcctccctggttcaagtgattcccctgcctcagcctcccgagtagctgggactacaggcgtgcaccaccacgctaatttttttgtattttagtagagatggagtttcaccatgttggccaggatagtcttgaactcctgacctcgtgatctgcctgcctcggcctcccgagaaaccaagtctttactaaaaaatatcaaaattagccaggtgtgatggacctgtagtcccatctacttgggaggctgaggcaggagaattgcttgaacctgggaggtggaggttgcagtaagctgagatggtgccactgcactccagcctgggggacagagcaagactctctctcagaaaaaaaaaaaaaaaaagtttgatcttggggagttctaaggcccactagcctcatctgtagaatggaagcaatagtactactttgcagagctgacttcaggaccaagagatctaatgtctatgaagcggggtacttccttctatttgtcaggatgggggaggctagtcctgtgatgactgggaatgaagggtaaaagagacagaggttgggtaaactccaggctctgtgttcatagcctgctcccagacattctcttgttatctctctgtttcctagcctacacacgtgcacagacacgtagctgctgttcaggaactgagctaatggttttaaagtctgttccttatctttgctggaggcaggcagtagctgtgcagtgacagtgtgcctatgcagacagagggagcagtgaatagcaatagggtgtttccaccatggtcttcactcaggccccggctgaaatcatgggccacctccrgatacgcagcctcctggcccggcagtgcctggcagagtttctgggtgtgtttgtactcatggtaggtaggatcactgcgggaaggaaagaagggggttgggcaaaagttcctggctccttctgttgtccttatctctttctcttggtgtcccccttcctctcaactccctatcacttttcgtttttatcctctcgtctctcctaatctcctttcctctcctacttcatcatttttattcttgtcattttaattctttctttaataacaagtgtatcatagttcttgaaacataatttttctctcttcagtttcccatttttatgaaagaccattttcatggtaagaccaatgtgctttattatacttggcctgatgattgtataaagtgcagcaagaataattatttttcacataggcttttaaaattggctttgatggaactcttccatagaaagaatcttagataagactttttaaagctgagccctgccatgggtttgtaccctcaaatgcctatgagttgggtaaattcttttcttttttcccacattctttccctttcttcttcctccactttccccatytcttttcccttccctccttctgcttttctccttcccttgcttgtcttctgtgctcattcatctccttggctgctcccctrgccttcccaacctttctccctgttggtctcctgggctccctgttcctcatctctcctcttctcagcagctcctcacccaaggagctgtggcccaggctgtcaccagtggagaaaccaaaggcaacttcttcaccatgtttctggctggctctctggccgttacgatagccatctacgtgggtggtaacgtctcaggtgaggagggtggggtctggtcatyagagcacgtgggatgtgcatgccagtttgtctgtctggtgatggtggaaacgcaaatccttctgtgactcgtggacattatccccttgaacagtgccccagactgaaataagcctttggccccaccagcccctcctctttctgtatctctccatcctgcttcctcacactaatgcttggctcacctagacagaaatcaatggcagggcacgaagggcagctgctatcctcttgtatcccccaccygaagtcctctgggggctcatctccactcaggacctctcctgtttgtaccccagatacacactgcatcggtgtgcttgggtggagccttgagacatagtgtgttgctgtggaaaaagcagacagacctaggttccaactttggattcacagtgtcttcttcttctttttttttttttttttttctttttttttgagatggagtttcactctgttgcccaggctggagagcagtggtgtgatgtctgttcactgcaacctctgcccctgggttcacgcgattctcctgcctcagcatcccgaatagctgattttacaggcacctgctaccacgcctggctaatatttgtgtttttagtggaaacggggtttcaccatgttggccaggctggtctggaattcctgacctcaagtgatccactgcctcggcctcccaaagtgctgggattacaggcgtgagccactgtgcctggcccacagtgtgactttgctaagtcacttaacatctgtaacatctggagcctcaatttcctaagctgtgtgatgagaattacactatctgccttaagagctataggaaggagcagtagtgttgtctggtgacaatgcctggcagtgacacttaatagatgctctttttctttccttgatacttgaaggggcccacctgaatccagccttctccctggccatgtgcatcgttggacgcctcccctgggtcaagctccccatttacatcttggtgcagttgctgtctgctttctgtgcttcgggagccacctatgttctctacyayggtgacagagggaacagagggagctgtgccttgagagcacctgtgggtgggcaggggtgcctcagaatggttttggatgaatgagcaaagagggaaatcctgggtgttcccttcctccacagatgccctacagaactatacaggtgggaacctgacagtgactggccccaaggagacagcctccatttttgccacctatcctgccccctatctgtccctgaacaatggcttcctggatcaggtaagtgtgagggggagacctggggacactactttggtcctgttcctcggcaccccagcctattgttcagtctctgggtggagtgtgggttgggtctatcttggcactccccaccatccccaactgcctgtgttgcacaaagccagatgacatggaatatttggatgagagagggcagatggagcacctggcagctgacagggaaccctctgcctctgttgactccaaggttctgggcacygggatgctgattgtggggctcttggccatcctggacagacggaacaagggagtccctgcgggtctggagcctgtggtggtggggatgctgatcctggccctcgggttatccatgggtgccaactgcgggattccactcaaccctgcccgggacctgggcccacgtctcttcacctacgtggctggctggggtcctgaagtcttcaggtgggagacagactctcctggtgctygcctccactcaccttcctctgctaagggctctgtccctgggtccacagcactctgcctttaaaatagctctcttggcttcttaggacagtgttctttctccaagtcatattctccccctttctcccttgcttccctcccaacttttcactgaaacagtaagatttagaggttgtgttcttaggcatgccacattacttccatgcacattagtgacttcatcagcaaaattaatatattcagataattccctaaggcaagaggctggaccaagctctcctggggttccctcttctaaatactatgctttggtgacaaggcaatcctcttcctggtgtctaccaccctgggaacaactttagggcactctcttgttactgccccccgtccttggagaggggaaggctaagggagtcactcctgataccttcccactgtccttcttttgcagtgctggtaatggctggtggtgggtgcctgtggtggcccctctggtgggggccaccgttggcacagccacttaccagctgttggtggctctgcaccaccctgagggcccagagccagctcaggatctggtgtctgctcaacacaaagcctcagagttggaaactcctgcctcagctcagatgctggagtgtaagctatgattaggacaaccctcacttcactcatggaccctggagccagccactgaccccgcctgggaacaacagwcattcttcctctttgttaatgtgccagaacctgggaggcttctctgtttatctgtttggcatcccttcctcctaaactaagaaggatcctggacagggagaagtggaggaggataaggtaccaggactcaggcttctcatcccctcctcccgcaaagcggttttctgaccctcagggcctctcggaatgtagttgctcgaggtaaccgctagagggtgcgcacctggatgctggatggggacggctgcgggcatctgcagggtggagggggccaccatccagtgtagggcacaaccctggggactgccctccatagcctgtcccgactgccgactcctagctctcatcgcctcggcgcctcccaccttcaccctctcggggatgcctccccaagagggtagttaggggtggggaagccgcctccacccagggggcgtggtgggggcggagggaaggagggcggcggggcacagagacagagagcaaggctgtgaaactgaggcaccgttcctagacatctcggtgctgtgtcgttcattcaaggagagttgagatacagtgaaatgagccagggcgaggagggagggtgaaggaacggagggcgggcggctccgaggagcgagagtcgggctgagggcaacctggcgccagggaaaattctggttattcaccacttctacagctctcctgccgctccctgcagaggatgctcgttttgcagagaaggcagtgttcctctattcccttcttccgaattaaaaataccccctcagagcgatctagcctcccgaattgttttttcttttaagatgcggatggacgtacgtgtgggggcatcccagcccagccacgccgaggctcggaagggctaagaccctcccactgccccgcacaaagatggctgctccctcctccccgctccttctcccctccccaaaaccccctcccgccccccggcccccgccgccggctccgtcacttccgccccgccgtggccgaaactgacacaaagtagcgggccgaggccccgggggagcggggccgcagctgggggggcgggagcccgtggggagccgagccgagcgccccccgccccagcccccggcatgggcagtacggggccgccggggcgggcgccgagcgctgagcgctgaggtgaggcgaggcgaggcgaagcgggggcgcccgggagcgcggggccaggagggcagagggagatgcggccgcagccgcggggctggaggggccggggagcgggtgtagactggggagcaccgggggccaagatttgggagctgcggccagacggggcggggatggcggccgactggagacgaggggctgtcgggtgcccggggacggggcagagcgggggtctgcgtacaggatgggaggatggggtgccgaaggggcgcgtggagagcaggagagcggcgcgagtgccaaggagaagctcgtgcagccttggccaggggagacccgcccagagagttgttgggcgagaggagtaaccgggacccgagggtttggtgcctggagaagggagtttgggctggtaggctttgtctcagtaaggtggaggtctatgcctgaggaaaactgagggtgtcaggaaggggcagtagctctgggagatgatagctgtgccgggagccctgagttctgtccttggtgagggaaggtggcccgagctcgtgttggtggccagtgagctggaggtctcgagttccatttcctcctgtttccctgacctgccatcctcctctgaaagaagtggccagcctttggggctcttgcttgtaagggagcagggaccggacctataggaggagctgttttcctccatggagcattgcctgcttgccggggctggctatttttatcccaaatgtggccgagagggggctggggctgggtgacggggcagggcaacgtggctgatgggcctgacctgctcagaaaacccaggctgtgtgagactaagaaggaaaagtgagaggggatcccagttcccaggtctctcctctcttccccttggaatgatggcccccccagaggggatgaggtctggggccaagcctgcttccagtctccccagggtctcagaggtagaacaactttcctggtccatatccagactcctgactcctgatggcgtgtgcagctcctacattaactctttcatgggactcaaactcagatgtttaggctgatagtgtttcttgatcccttcctccccaagggcggggctgcctgtagaacttgtgatgcccactcttgcatcctttaacctctccctgtgctccccaccctcccgtgactcatactcagactgggtggagaccctggctgggggccctggaggagggcttggcatctctaaaatatggatgaggtttttcttcctgagccaggcaccctggactgccatagttggagaaggtcagggatgaaaaggacttctggctttcaggattgcctgacttggtgtaagggcgggatctgagctagcgaagggagaactggtgtgggtgactgggttgtggccagaatctgtaattatagagcttagccagacaggcaattagtatctcttggggctgacaggttggtggggtgtgcctggtaggctaaaggcagagggaaccaaagaggatgaggaggtgaaaggccttccacccagacaaggaaagaggaggtgactgactggcagtttcctttgggccaggctggggagtaaggatgaggctctgccttgtaaggccaggccttgaaccttttaggagaaaggacatgggaaggcggaagcaggcagaggcttgtctcactggtgctccctaagcctgcaccctgtgccatactgactggactaggcttggggtgggagggagggaggggcaaactccccaccagggttgggaagacccctctgccagcccagaagggtggctgacccaggctgaggggaagctgtttagggactgtctgtgcagaaagtgagggccatgcctctaatgtgagctcccctggaggaggtgataatggaagccctagtaatggggggtggggatggcagggaacttataagcctttcgagaagggtggagcctgcccaccctgtttcctgatgccctgccaggtgtttcctggctcatgttccctccaccccaccctttggggaaactgctttctagtaagcacaagcactactcattgccgccagaacacatgagagcctccattgtccctgggatggataccttgagagctgttccccttttttcaatatctggcctcttctcctttccctacaggcatgggcttctgtaaagtctcagccccccatgtcacccaaggcaggggcatgatgggaggtggtggggaagtcccctctttcccaggaacccatcatggcagtaagaggagagactgggagaaggaggctgggggaggggcagggtcagagctggagaagagggtcttcaaaagaggtctcatgaggggagggaagggttatcctcagcttcctgacctcattcgtctgtcacttcttgcagggtctcccatgggattgctgggatcttgctgggtgagatggcagtgtgygcaaaaaagcgccccccaggtaagacaggcaaggaggggagatcccgggaaccatcaagagtgggtgttgttatggctcagggagcaaaaggaaaagggacaactggtatgggtctgagggagggtagcttacagcagcccctacccagcttgggggcagcctaggaaaccgaattcttccgcttgatcccaaagctgggttatctgccaggacagcgcagagcaccagccccacgccccgaaacacctgcagtcttatcttcgggcacctgcagctcctgctttctggcctagggagctgtgttctcatctctgcttggtcctctcaccccttccctgctcccctcgtttttccatctaccggttctcctggtttttccgcgggcgggggtgtgtgtgtgtgaaagcggttgcccccgacaacgccggcagtccgctcacccgcattggcccggcccgggggtgggaggggaggcggggctcgcgcgcgagctttcgcctacgcggcgcgctggcaggctgcggctcctgcagtcggggagcgggcgggggcggaaccctgggcgtgctcggcgtgtccggggccactcagcgcacgctggcatccgccggggggmatggggggcggcggcggcggcgcagctgagctcgcggtgtccccgagcgccggcggccgggaggatggcctgggctgcgggtggggcgcgcgcccgacggctggggctcccctctgagcggctgcggctcctgcacctccccggggagccgccccgtcgatgccactaaggccaaggacatatagacggtctgccctcccccactcaaaccgggatcatgacggtccccaaggagatgcccgagaagtgggcccgggcccaggcgcctccctcttggagccgaaagaagccctcttgggggacaggtaacgggaggcagcgcctggcagctctcccgcacccattatttcccccctccaatccctacattcacttgtccccagcctccccctacctgccttgatcctctttccagacccagagatcctggctccgaaggatccagtccctaccttcttcgtttgcatggtctttggtgattgcgcaggggacttggcccaagagagcccctctagggaagtttatgggagtgaagtggcttggtaggcagggggcactgtggcctgggttttgttactgcagtgtgctctgcaggggtcctggggtgtgtagaaagggttctggaatgctgtctttggctcccggacaggcttaaggcattaggtttgctgcctaaccaagttacccctttttgcagcatgaggtcatggtgacccccggggagacgggctggggaatctattataggacagctccttgttctgggacatgaatttgatgcctgcagtcccagacctgcagaggtttcagataggtttagctagataggtgtcactaactgagtgacagatgagccctttaaagctaaatgtgtgcagatggtacaaggaaggtccagttagagagcaactgtttcaattacatttcattcctccctcctctatctctatctcagtctgcatgacccatatccctgaaacgcaccccccacacctttttctacttgaagatgagctttgaaataaggtgatgtcatttcgggccagtcagaagcagttgctggtgacatgtgacaaccagaggctcctgtaggggggactgcacatggggctgggatgctcccgcagagcagctccagggcacagggagcctccttcttgccacctaccccactctctaaataagggagagagcagtaccgcgactagatctgcagtggtccccagggggaaggaagctttgcgttttcagcgctactccttgattatgacaatgtatgcattagtaatagcagcaaaaggggctggggaatcccaggactgtcagtggctcagattcctctggagtgggggtgggggagacaaactgggtgcttccagtggaagaccttgaagtttggtggtgaggaaaagagaacatgtcctgtcctgtgaatgtaacctggagagccgtgtggtcaggctgctggtgagaggtggactggagggaagaatttgatgaccccctcagttgtggagctaactccttaaaatgatattctgtggaaaaaaacagggaaccccccagcaaagtgttggtccagacctcagtttgctcctcctgactgcagcatcattttgttgcagaagaagaaaggagggcgcgggctaatgaccgagaatacaatgagaaattccagtatgcggtaagcgactctagaccacctgttccctctctctgtttggagaggggaatggggcaaggacaacctaccgttgggactgagggctgcctgggaagagtgcttgggggaggggaagcaacctcctcagccactctccatctgctatcgtgctgaatttttcatgccttcacctgtcagtgaagcagaatacattgacccccttgagactcccttctctcctcctctttccccctcccacacctgtgtttgctagcttttggggtagaggtctggggaagtataaagatgggggaggcagcctcagtctggttctgggttgggactggagactgctcattatcttctctcctactgccatagagtaactgcatcaagacctccaagtacaatattctcaccttcctgcctgtcaacctctttgagcagttccaggaagttgccaacacttacttcctgttcctcctcattctgcaggtaggtgacccatagtagattttttgcagytccccaaactgaataaagccaaggaagaggaaagggaatgaaggcatcagatggggcctcagaggcatacttctctttctttttttcagttgatcccccagatctcttccctgtcctggttcaccaccattgtgcctttggttcttgtcctcaccatcacagctgttaaagatgccactgatgactatgtgagtggttttcattcttctattttgtcccagtcacccacccctactcccagccccacccccatctcatggccaccttcattcagcacaatttcttggtgaccttgacatcccttacccggtccagctagatccatgatgtctttttgctgagcgtggggagagggaatcagggag

SEQ ID NO: 8809 - DNA, 56173 bp, Homo sapiens
ggtgaaactctgtctctactaaaatacaaaaaaattagccaggcttggtggtgcacacctgtaatcccagctacttgggaggctgaggcaggagaattgcttgaacccgggaggtggaggttgcagtgagctgagatcacaccactgcactccagcctgtgtcatagagtgagattctgtctttaaaaaaaaaaaaaaaaagaagttctgcattatctccagtaatactctatatcttacagtctatctactctttgatattaaaatagtccctccaggcttcttatgctttactgtttgctttcaacttatttgtgtctttgttttcaatatttatctcttctaggcaacatataattgtggcttccttttatatccattccaacaactctacctttaaattaaagagtttagtccatttatatttcatataattcttgacaaggttggatttaggtctatttgttttctgtttatatcttctgttttggtttccttttttttcttttcttttttttgacatagaggtatgtatatgaaaatagcgtgtagtttttacttcttttttctcctcttcttttcctgatttcttttgggttaatttaataacttgaatatattggggcttatagcataccttcttaaattattattcttttagtggttgccatagggattaaaccatacttggagttaatattgtaccacttcatctctttttaagagacagggctttgttctttctcccaggttagagtgcagtggctcagtcatagctcactgcagcctcaaactcgtgagttcaagtgattctcgtgcctcagcttcccgagtagctgggattgcaggtgtgtgctgccatgcttggctaatttttgtatttctagtagtgagacagggttttgccatgttggccaggctggtctcaaactcccaacctcaagtgatccacctgcctcggcctcccaaagtgctgggattacaggcacgagccactgcacccagcccatcttatacttaagaacccatatgtgtctgtatagattcatctctaaccctgttctttatgctttaggtttcatatttattatagtcagatacattataaacttcagtacagtcgtatgatttttgctttgaacactcctgtgtattttatagaaattaagaggaaaaatagtctattttcctactaatatcatttccagcaatctttattcctttatgaaaatctaagtttccatgtgtatcattttccttcaatctgaacacattttaaagaacatttcttatggtgtccatctgctggtgatgagttctcttttaatttaactgtttattttttctttgttcaggagggatatttgcttggaaatggaattctgggttgacagatgttttgttgtgttttgtttattcctcatctgttctctattgtttctagtttgtagtcagcattcataggtgtacttgttcctcctatgttatttttctctagctgttttcaggaatttctcttttatttttgagttccagtagtttgactataatatgataaacctacttgtgggtaactgcatttatctgcttggagctattagagcttcttgcatgtgtagatttatgtctttcgccaaatttgggatttttcttgtaatattttgttctgaatcattttctcttctcctctggaacttcagttcaatatatgttaagaccttttggccaggtacaatggcgtacgcctataatcctaacactttgggaggctgaggcactaggattgcttgaatccaagagttcgagaccagcctaagcaatatagtgagacctcatctcgggttgtgggggaagaccttttaatattgccccatgagtccctgaggctttcttttttgtttttttttcttttttctttttgagatggagtctcgctctgttgcccatcctggagtgcaatggcgctatctcggctcactgcaagctccgcctcccgggttcatgccattcttctgcctcagcctcccgagtagctgggactacaggtgcccgccaccatgcctggctaatttttgtatttttagtagagatggggtttcaccwtgttaaccaggatggtctccatctcctgacctcgtgatctgcccgccttgacctccctaagtgctgggattacaggagtgaaccaccacacccagcactttcttttttttctataagattggataatttatctttatcttcaagttcattgactgttattagaaccatactctatacccatacagcgaattttctatcctagaattagtttctattttttgagatttcctgtttattcttgttgagtgtatttcttttatgtccaattagcgttataatagctgctttgaaatatttgtctgttaaatccatatctgtttcatcttatgattggtcttcattgattgctttttttaaaaatagtttttttttttgtttgtttgtttgtttttaattgagacagagttgctctgtcacccaggctgtagtgcagtggcatgatctcagctcattgcaacctctgcctcctgggttcaagtgattctcctgcctcagcctccccagtagctgggactgtaggtgtgctcctccacacctggctaatttttgtattttcagtagaaactgtttcaccatgttgccaaggctggtctcgaactcctgacctcaagtgatctgcctgcctttgcctcccaaagtgctgggattataggcttgatccaccgcacctgccccattgattgctttttgatgactgagttttgttttcctatttctttgttggtctgttaatcttggattatataatagacattgtgaatgataaattgtagagcctctggattctgttatgttccctcagagtgttgatttttacagtcttgtcttcagcagtcaagttgattggattcagatgtcaaactctacctccttcacggaaggcagcagatgaaatatttattgttttgttttatctggattgtttagtacctgtcctgtgcatgtatagttccagtgatcagccagaaatttgagtagagtttatatatgaatttggactttcttcttcttaggctgtctccctttcatcactgttctctggctttctagctgctgtggttgtcctgaactctatcctcagattcttcaagccagcaagccaacaagactgtgggtttctgagggttttttttttttttttttggagatggagtcttgctctgttgcccaccaggctggagtgcagtggcgcgatctcagctcactgcaagctccgcctcccaggttcacaccatcctcctgcctcagcctcccgagcagctgggactacaggtgcccgccaccacgcctggctaatttttttgtatttttagtagagacggggtttcaccatgttagccaggatgttgtcgatctcctgacctcgtgatccacccatcttggcctcccacagtgctgggattacaggcgtgagccaccgtgcctggcaagggtttctgagtttttagtcatacctctccccttcttttggcatccactggggcacaccctcaggctgaaaggcatgaataaaccgtctagagccctccctgcttccaaggtattgttgatgtcccttccattttatagctattttggtcactctgtagtgcctacaggcagttgttttgtgatattttgccccacggtttgttgttgttatcagtggcaaaagttgctctgatagaactgcttagctaatactagagaagtcaaaattctccatattagttttaacagtagccttaaaaaaacagaatgatagctaatatttgtttggcactttttttgttataaaagcactttaatgtagattgtctgatttatcatgattgttaataatacagtgctgctacatgttgtgccaaaaatatgaacaggaaatgagtctgaagtctcaattcagcatgattacacatatgaactgatacaacaactaaaatgaaaataagtggggagaaagatagtagtggaaactataggtatgaaaaggaatagaagaattttgtgcctttggggaggtgatactgccagcaggtaaatggagtccmtgtatgcatatataaattactgtcttctgtattagttcttttcatttgttatttttatgtatttacttgccttttgagatggagtctcactctgtcacccaggctggagtgcaatggtacagtcttggctcactgcaacctctgcctacccggttcaagtgattctcctgcctcagcctcccaaggagctgggattatgggtgtgtgccaccacgcctggctgatttttgtaattttagtagaggtggggtttcaccatgttggccaagactgctctcaaactcctgacctcaagtgatctgcctgcctcggcctcccaaagtgctgggagtacaggcatgagccactgtgcctggctgctttttgttttgtttgttcttttttttgagacaaggtctcacttcgtcacctaggctgcagttctgtggcacaatcacagctcactgcagacccgtcctcctgggctcaattctcatgcctcagcctcccatagctgggactatcagctaatttttacattttttctcccaagaaatcttgcctaagattaaattattgtttttttgagacgagtctcactctgtcgccaggctggagttcagtggcgtgatctcggctcactgcaacctctgcctcccgggttcaattgattctcctgcctcagcctcccgagtggctgggactacaggtgcacgccactacacccagctaatttttgtatttttagtagagacggggtttcaccatgttggccaggatcatttcaattactggaccttgtgatccaccccccacggcctcccaaagtgctaggattacaggcttcagccaccatgcctggccgattattgtttttatacatacaaggtctcactacattgcccaggcctgcctcaaactcttggcctcaagcaatcctcttactttggccttccaaagtgttgggattacaggcatgagccactgcacctggcctcattcttttataaaacttttatttataattttaataatatttatcacagtttgaaattctttgtctctaaaagaaccatggggaaaagaataattttttataaaatttaaattatttaaaaattgttttctgtttattcactacactgtaagctgtgaggaccaggaccatgtttttgtatgtccagctcgtaggccagtgcctgacatgattttgaaggaggtgacaggtagaaattgaagaaatttattggaaatgttccagatttggatggttttcattctactagatagyagaaaattttttgggctgggtccagtggctcacgcctgtaatcttagcactttgggaggccgaggcgggtggctgtcttgagccaaggagttcaagaccagcctgggcaacatggtgagaccccgtctctacaaaaaaaaaaaaatatatacaataactagccaggtgtggtggtgtgtgcctgtagtcccagctacttgggaggctaatgcaggagaatcacttcagcccaggaggtggaggttgcagcaagctgagatcgcaccattgcactccagcctgggtgacaggagtgaaaccctgtctcaaaaacaaaaaaaaaaggaaaataaaaaatgggaagtgttaaggctaagctcaatactttgagcctcaaaagaaatattcaggccatggtcttgagtagtgagacaccagaagtatggagatagtgatgaaaagcagtcaatgcttttcattccctcttgcttctgtgttttagggttccgaggtcctggcatgatagggagagttcaaagcaagtatttataggttattagrattgattttcttagttgtgaaactgtcttgttccacagctcttggataagcacaagaatacagagagcatggtggagcttctgracttgkatcagwtggaggatgaagcctacagcagccttgcagaagctacaaccgaactctatcagtatttactacagccattccgagacatgagagaacttgccatgctacgaagacagcagatcaaggtatttttttattaatcctaactagtagcctgcctgtttcatagttctcagcctgaaaggccaygcgttatccacaagaggaactttaaaaaaaaaaaaaaaaagaaggtacctggtcctatttctgcaaagtttcttgtttggtagaatagggttgtagcctgagtatccattctaaagcacctcaaaaggcaattctgctgagtagccagggttgaggatagcccagaaagtaatgtgttcaagttagcacaaagttgtaaatacattgggaggattcctattttctccctttcctgcactttccttcctcctctagtcatgtctcctytttaatgttttggagactgtgtactcttagacttcattaccagaaattttgggcaggctgagcgtggtgcctcacacccgtagtctcaacattttgggatgctgaggcaagaggatcacttgagctccgagcttgagaccagcctgggcaacacggagaacccgtctctacaaaaaaaaaaaaaaaaaaaaaaaaaaaaaaatcaaactagctggatgtggtggcacatgcctatagtctcagctacttaggaggctgaggtaggcggaagattgcttgaacccaggaggtcatggctgcaatgagccatgattgtgccactgcactccagcctaggcaacaccttgtctccaagaagaagaaaaagttttgggaacatttcttttttttttttttttttcgagatgggatctcgccatgttgcccaggctggtctggaactcctgggctcaagcratttgcccacctcggcctcccgaagttctgggactacaggtgtgtgaaccaccatgcccagccagttttgggaacatttgttttaraagaacttgttaggaaagttttaagtttttaatgacagaactttaaatacatgaaattttttattagtgtgtgacaaagtatattacaaaaaatttttttcagccaggcatggatcatgcctgtaatcccagcactttgggaggctgaggcaggtggatcacctgaggtcaggagttcaagaccagcctagtcaacatggtgaaaacccatctctactaaaaatacaaaaattagctgagcatggtagtgcatgcctgtagtcccagctactcgaagggctgaggcaggagaatcactttaacctgggaggtggaggttgcagtgagccgagattgcaccactgcactccagcctgggcgacacagcaagactctgtctcaaaaataaaattaaattttttcccccacaacatgggtgaaaaagcattttttgaggcaagcatttaagggtttgattttatagctgaccttaaatgttatgtgtaattcatatataaatgttgctgaactagaacattaaaattgtctttttacctaataggttaagttggaatatcattatgtaagattgagtatttgagaaaattagcaattactttgagaaccttatgcgtggggacaggggtgagtatatttgaaaaggtatgagaaagtaaggttgtctgtgtgtcttattttctctttactaacgtatcagggtggagagtaggacagtcacacgacttagacatactcctttatcaatacttttggaaaayagctgtgctgtcagctttttgagggggggatttgttttggtcagtcagttttatcataaatttggcatttgggttaaaacagcaacatggaacaaataatttttagatgttggaaattcctggttttttttgttttgttttgttttgtttttttgagacrgcgtctttgtcacctgggctggagtacagtggcatgatctcagctcactgcagtctcgatgtcctgggttcaagcagtcttcccacctcagccccacaagtagctgggactatgggcgcatgccaccacgcccagctgttttttgtcgtagtttttgtgcggaggtctccatctgttgcccaggctggtccagaactcttgaactccagcaatctgcccaccttgattgcccaaagtgctgggattataggcatgagccactgcccagcctggaaattcctgtttctttaaatgaatcatggatatttgtctgctaagaacttgactagaaggccaggaataaactggacgacctggatacccacctactttagactgctgcattgtttagcagacataatctctatagcacagcactgactatccagaatctgtacacattcttttacataattatatcatgatttgtattgggtattaatattrgcaaattggttgaccctacttgtcagcctrtattgtccactagcatcacttaactgctacatttttcctgggaagtagaatgtaggtgaagaggaacagaaaacatattttgaaaatttgtgtcttttctgacagtaaaaatggtatttcactgcatttctttttctaagacattgagaaaatgccccatcaatcatgactattcttttattcttgatcctacttgtgaatttgcagatataagtttttgttagccaacaactagatttagttagcaactcatacattacattagattgagtgtgttgtattgctttaaaaagatccgctaatttaattatcacacaaccttgtaagttgggtactcttattatttgtattttcctacttcatagataagaaaactaatattgggataattatgtacttgttcacagctaatttgtaagtggtagaactgatacagtactcaaatcaggcatttctgattccaaagattttttttttttaactgcattactggttacttgttacttctaagttaaaaaatctactcagactttttaaatctggaggagctaaaaaaaaaaaagcaagtataattgattagcaaagtagttgttttaagtattactaagatgtattagtaatagaaaaaaagaaaataatttatttttatttttatttttatttatttatttttttgagacagagtctcgctctgttgcccaggctggagtgcagtggcgcgattttggctcactgcaagctccgcctcccgggttcgtgccattctcctgcctcagcttcccgagtagctgggactacaggcacctgccaccacacccggctaattttttgtatttttagtagagacggggtttcactgtgttggccaggatggtctcgatctcctgacctcgtgatccacccacctcggcctcccaaagtgctgggattacaggcgtgagtcactgtgcccagccaagaaattaatttttttttttttttttttttttttacttttaaaacctttttgttaaaaactggagcacaatcacacatctagggcctacccaggatcaggatcatcgagatgtcactaggccaatcaaacagatttttcagctccaatataattttatcaaacccctattgtatatgtgtttcattgttgactgaaacatcattacgcagcacgtgactataatagaataatttttggcaatgcaaaggaatgaactgatggacacagcatgggtaaatcttaaaatcatgctaagtcaaagaagccaaatacaaaagaatatataatgcataaagggggatggacttaaaaggggcacgaagaatcttttggagttgatggaaatggtcagtatttgattaatgttgtttcagaggtgtatacagctgtcaaaactcattgagttgaccactctaaatggattcacttggttgtatataaattaagccatagtaaaattgcttacaggaaatatgctgaggaaaagacatctaacacaaagagcataaactttgtgatacctttatttgaaattctaggccaggtgtagtggctcatgcctgtaatcccagcactttgggaggccgaggcgggcggatcacaaggtcaggagatggagaccacactggctaacacggtgaaaccctgtctctactaaaaatacaaaaaaaattggccgggcatggtggtggccacctgtagtcccagctacttgggaggctgaggtgggagaatgacatgaacctgggaggtggagcttgcagtgagccgagatcatgccactgcattccaacctgggtgacagagcgagacactgtctcaaaaaataaaaaaaaaataagaaattctagaaatgatgattttgatctgtactaacagaaagctaaataattgttgccttgggtggcttaggggaaattgacagggagcaagcaccacagacaactttggagtgattctttaaatctagattttagtgataaaaatgaatgtacacatttgtcaaaatcaatcacaatttacattcaaaatgttgccttttgtaggcaagttatatctcaataaacgtgattttttaaaaaaagttaaatgtgaagaatgtacacacttatataagaagcacacaaaatggggtgatcagtgcctaaagatatatgtgaaaagagggactatctagtgcttcactattgaagaatgaataagaattttcagtaggaagtgggtacgttacaatctctgtcagagattggaatagagaatattcctgatgaagagatgtacaaagaggaatggtttagtgcttatacttagtgcttgtgctttaaccaggtaatgtggtattggcactaacttaattgaatcttcacaccaatccagcaccattgatggttgccagaaagtagcgtggttgggattgaacacgtgtttgatagcaaaacctgctgttatccacagggtgtgaattgtttggtatgcttttagtctaaggatttatagaagatgagaggaaagatggttggaatgttattatattctatggacagttgtgtctgttgggttctaatcaaaatatcaaaccggttatttcaacagagaatgataataataataatwattattattattttgagacggagtttcactcttgttgcccaggctggagtgcagtggtgcartctcaccgcaacctctgcttcccgggttcaagcaattctcctgcctcagcctcccggagtagctgggattacaggcatgtgccgcaatgcctggctaattttgtattttttagtagaggggggtttcctccatgttaggctggtcttgaactcccgacctcaggtgatccacccgcctctgcctcccaaagtgctgggattacaggtgtgagccactgcacccagccgtcaacagagagaatttaatataaagaatttgttaactaggtataaagtagttaaccaaataattgaccttttctctttatgaagagcttgatttccaatggtttcattaacctaggtattaaagtatgataggaaagaagagaacttggcatcccaaatgtataatgtatttatatttgtttttacatttaatatttatgatattaacataatatctcacctgttaagtattaagcagctcctgcctacccagcattattttaggccaggaagtctttctgagatagacacccctttagggagctcacagattctaagtctactacattgggtctcaaaaatgtgatcacctgactagtagtatcagtataacctggaatcctgtagaaatacagattcttgggcttcacctcagatcttctctactgaaactctaggaatggacctcagcaatctttgttttgacaagctttccaggtgattatgatacacacttaagtttgagaaccactagcctaataaaacaggacttgaaacagcttagggatttcacatactgaactgaaggttacaatttttctgggtctgagtttttctgggtcttaccaaattgactgcagtattaaatctacaaaacttcaaaagtcagttagaaacagcattaaaaagtgcaaaaagcgtgtttgtattctttgtatttgtagctataaacacattttgaaggtaaagatattaatccaacagcaaggtacaaattactttctttcttttttttatttttttattttatttttattttttttcacaaatagcactttttatttgccactatttgaagtctgaactttaaacagattcttggactggtggttcaaaaccatcagctcgttcaactttagcacctctctcgtccccagtggcttttccagaactactgccttcaccatgaagctccatgagctttcccaattcaaacttgggcttcttcagcatttttacttttctaacgaagacatcatggagaggatagattggcaagccttttctrtgtcttttccaatgctgtctggaatcaatttattgaccacttctttcaaggcatttgtctgcacctctcgggtcatgatttccatcatcttcttccggatttggcggacccgttggtgctgggcataagaggtcttctgtatctgattgttgcgttttttagtaaaaccaacacagaacagacgaagcaagtaaccatcaatagtcctgacatcaacgtgagcttcaatcattgtctgccattttttgaccatggaacacattttgtcacaggtaagatccatgccatggaagttaggcagtttttaccctgaacatcttcagtaatcagcttgaattttctaagtgcaacttcatcattctgcaaatcagcaagactcacttcaaacacacgacccttgagaccatcagatgcaattttggttccttgggtcctggtgatgagcatctttccaatatttcttatattgaacatagcaggtgctttcacatcataccaatctttcttagaaaatggatcaaccactttcttcttggccccctttttgctgcctttcgtaaggtgcttgttcttgccaaccgccatggtgctggtcagagagccaaaaggaagttactttcaaatgaaagtaaaatgaagttgaaactagacgaacctctagatttttaaatccagtgtctttaatgagtcagagccagctggactatactcatcatcttgatcaaccataagcacttcagacagattgtccaacttatttttaaatacttcctgaaagtaaataagctagaaactggaaggcacttgcatttctttctgttgtagccagtcacctcattttgccagttgtctcctagtaaattcttgaatgtgcatttcattcttatcccaacccccagggcaagtctgtaggtgcctttctgtgaaatagaaaactgcaccccctgccccccacccgcccactgccagtcacccatcaaacaaattaggaaagagccctttttcatcaagtgtagaaatacacatggcctggcaaagcatgggctgcatttcagtatctactccatccccttggctgggtgctatttattgtgcagggtgcagtttttaccactgtatgcatccaccgcatgcacactgtgaactaggtagtgccaccattatacattaagatactcatatctcacctgagctatactttcctttagttcactwgagtttcgatttctctttttttttttttaagcatagtttctcacacttggcttagctataagaatctctcaacaatatttgctctgaatataaaaacccatgaatagatactaagctaatcatgttgttagatcattcaagagtcatcttcaggcaactccagggtctggaatatttgcattgtgggtgctgttacattagtatattcacagttttttccccctcatcttcttcatgatggtacattcacagatttatcttggcattgttttaccaaagaatctaaggtggatttcccccctactgtgtttcttacataaaagccagtatccaagtgctgtgcttcataataattccacgtcaggtaatttgtatttataaactagtttcgctatcctagctgacacgcgcttttttccgtgttaaaaacaggcactgttttctttctagcactgaaattgaaaacagaggtgtcattgtttttagcacatgatccatctaaccagtgctgcacatcttcaaatttgccaagttaggaaaagtacttagtacccttgtttaatgtcttaggtacaataaactattaaacaagttgcttacgagttggctgcaacattaaagctacgaaacttcaaaaatcagttaaaagacagcattaaaaagcatagaaagcatgtttatgttctttgtatttgtagctgtactcataaaggtaaagacattaatccacaacaaagtacaagttactttcaaataacttgccacaggttaaaaaaaaattttttttgcctcttcaaaaagcctcaaggctgggcgcagtggctcacacctgtaatcccagcacttcgagaggccgaggtgggcaaatcacctgaggtcaggagttcaagaccagcctggccaacgtcgtgaaaccccatctctactaaaaataaaaataaattagccgggtgtggtggcgtgctcgtgcaatcccaactactcaggaagctgaggcaggagacttgcttgagaccgggagttggaggttgcagtgagctgagattgcaccactgcactccagtgtgggtgacagagcaagactccataaaaaaaaaaaaaaatccataatgcaagttttacacttttctttcgataaatggtacatggacttaaccatgcaagtaagaatgatttttgtattaagatttttgaattctgaacactattaaatttctgttccatagttgtatctgttgagagctaatcagaaaaactagttatttcaacagagagaatctaatataaagaatttgttaattaggtataaagttgttaaccagataattgagaaggcaagaaagtaactctaaggtacttccagaggaagcaattgtaaaaacagctaccactcctagggttggagaaacaaagagaagggattggaattattaaaactgaagcatagaggaggaaccctgtggagctgacctgaaaaagagggcattgcttgcctggtgctcaatggagagacctagttctcagaggattcagtactgaggggttggtttgtcttgggggttgtactatgagcctagggttgaaaaaactgcaaattagattccgttactgcttcagaaaggaactgccgatgctggggtgaaataaggcttgggtgatgctgacaggaacagccaccagttgaagtcaagggatgcagatagaagcatatctcctccctcttccaaactcttctattggcaaaggctaaatgtgatttgcactctcaaacctagcatcacaagacagaaggatgaacttggagatgaatagacaagaatgtacacacatcttcagactttcaaagttagggggaactagcttaaggttttaggtacaatcgactaattacggatctttaacctttggacagatgttacagctgctgagttttaaaagtcagttaaaggctgggcatggtggtgtgcacttgtagtgtcagcttgctgggagactgaggcaggaggacacttgaggctgagagtttgaggctgcagtgcgctaatgattgtgcctgtgactagcccctgcactccagcctgggcaacatagtgagacccccatctctaaagaaaagaaaaatttaaagtcagttaaacagcagcttaaaagaaaagcatactgggcattcgagtatttcaccttctgtatatttgaatatattaaggtagcaaactatgttatcttcacataattgtcaaaggatttagacttttcaaaaaaggtataacttcactaatttccatttgtcttttctttgtattgttaaataaagtgtaatcatgtcattgagaagaacttctattataatatcctgagtaagggatttaagttttgacttgtatcattattaaatttctatcccatacttgtaaatactaattgtatgcttttaaacctgtatgttttaaattcagaggtaattgcaataaaagaaagcacacataccaattttcttatagcaaacaactccaccagaatccttaaatctaagatgaagtctaaatatgtcacttagtgcatagaatcccacagtggtttcctgtcaaattaaatacacggtccttagcctgacattttaaatgtcttttaagacaacctcatatgataacaacctactttcctagtatctctcattactttcatttttctctcctgaaagcaagcaggctggactgctttccatcccttagcaggcacaaaaatttttaggcttttgctcagattgctcctcacctctcgcatgccttttcagtggtttttctctctttatgtacccgtcaaaatcctaccccttcttcaaagccatctgcagttaatgaacctcaatgaagtttgtcctcatctacacaaatgatactctttccccacaataccttttatttttctcataggtgttttacccagagacacacttaaccatctttagtatctggctaaaattctgttaatataaaattctactcttaatatttccagatattactcattattccctttcgaaagtctgcccagactttgcacccagatttctacacctgatgctccccttgatgtcttaggcatgctcactcatgacttttttttttgtttttttggtattctaattctttttgttttgttttgtttttttttgkttgtttgtttgtttgtttttagtagagatggggtcttgctatggtacccacgctggtctcccaactcctggtcacaagcaatcctccctgtctgtctgggagcaaaaggaaagcagtttttgcgtgactcagctcccaagcttatcttgccctttgatatagtgagtttggggtcttgagattttattttcctttcacagcattgtttagagactatgggttgtaggccaggtgtggtggctcaagcctgtaatcccagcactttgggaggctgtggcggtcggatcatttgaggtcaggagttcgagaccaggctggccaacatgacaaaaccccatctataataaaaatacaaaaattagccgagtgtggtggcgggcatctgtaatcccagctactcaggaggctgaggcaggagaatcacttgaacctgggaggcggaggttgcagcaagccaagatcgcactactgtactccaacctggacaacaaagcgagacgccgtctcaaaaaaaaaaaaaaaaaaaggagaatatgggttgtattatttctaccttcagaattcattactagctttttagtggcttaattatacttgatcagtgtttttttaagtgtgtcatgggtgggttaacattttgcctgttttttttttaatttatcctaataaagttgtcattggcttcatatataacttgctgatagctatttctctgtatatggtaaagcaagattgtatgtataagtgatccattgcagttcttgattgtacctttcttccatgttaaaacatacttatgtagtgttttgaaatatacttttaatattatcacttctttaaattttgttttagcattcacctggttcattcctgtccatcctttgattttcagctatctgagccaccgtgcctggccttcctctgttattgttatctaaagtcttttcagtatgcctataggctggtttttatattgtcattgtgaaaatccaggttttcaattgttttatatagtggctgttaaggaaataaacaatttaagtaatttgggggggggcataaataagtcttaaccaaaaaagatattttatcatagaggaggaaataaattcctcatcgagacacctaaaaacaatcagtcttaacatattggtatatattctttgcctacgtatggagtgagagggggatggaagaaagggcaaaatggggaataggtttctatgtcaaatatcttcagtattattgttaattcacttgttttgtaaactaatagcttatcctcttgagcagggaagaacaagtattctttgtggtatataaactttaaatgtttgaggaatgagtagaagaaagacttgaacttcttaattttttctttttctctctgaagatttccatggagaatgattatctgggacctcgaagaattgagagtctacaaaaagaagatgctgattggcagcggaaagctcacatggctgtactgtctattcaagatcttactgtcaagtactttgaaataacagctaaagctcaaaaaggtaggtttctcagtaaatttatcctttaggtatttttgaaaatgagtggttaagtattttatgttcagaaaaattacatagaaaagtatataaagatcactcataatcccagcaattagagaaaaccactattagcaaattaaggcacatcctatcagtcttttcatagatacatatatttaaatatrtataatttaaatatgaatagtaaataattgtgtttctactaacatactgaggaaaaaaccataaaacctcacagaattaatgctttcctggaaactttgaaagttaataacaccggacatgtgagagtatttttaaagtttctgaaagctaattttataagtgttttaactgcagaaygttatttctgaggacagattgaagacattagartctaagatactctcaaattatgttttagaaatgtcggccgggcacggtggctcacgcctgtaatcctagcactttgggaggccgaggcaggtggatcacaaggtcaagagttcaagaccagcctggccaagatggtgaaaccccatctctactaaaaatacaaaaattagccgggcatggtggtgggtgcctgtaatcccagctactcgggaggctgaggcagagaattgcttgaacccgggaggcggaggttgcagtgagctgaaatcgcgccactgcactccagcctgggcaacagagcgagactccatctcataaaagaaaaaaagaaaaaagttataagcagtttatcatgacagcaggatttgtttctctttgtgtggtcagtgaaatctttttcaaatgcttcagtattaagttkttatttgtcttaatttctctttaaaaaattattaatagctgtgtatgatcgaatgcgagctgatcagaagaaatttggtaaagcatcatgggcagcggctgctgaacggatggaaaaactccagtatgcagtttctaaggaaactttgcagatgatgagagctaaagagatatgcttggaacagcggaaacatgcactaaaggaagaggtaacaaaaatcwtcagaaatataaaatcagaaaaagttacagtttgtcattttaatctttgcacaagacatttttttgattcgataggcagtgattttatgccatcttcatgagatgaaaacacttagaataggtcctgtgacttaagttgtcattagaagagttagacgtagygtatttcacagcatcacagtgtgatggttggcagcactgcactgttgatcagaggggccagcatcagaatttcttagttgctgtaaagtttttaatactgtaaaaacgtaaagctttccagcaattattaagaaagtatcactgaccagagaaattcagtaaaatttctaaggcagtggcattttgttaggattgattatataatgcttttataccattacattttggaacttcccattttattcctactggaacacactggtctcccccatctcccaccacctctgtacccgctacagtcactgtctatccttttttactattgacarttataaatattcatacccattttgtgggctgccctcattggcttgaaaacactgagtacatatttattaaagtagcacattttagttgctagagaagaacaaatcatcatctctgctttagttataagaatacagcattatgtaaaatatgtatttttttggcttaggttgtacagcaagatggttctcattgacatttttgaagtgcttatgctcatatacactttttgttgatggatttttatcattatttcatttcccccttatttttatttgctggttattagaaggtaaaattggaacttggcttatccgggaaattgttcacactttatattcagaatcgctgtgcatggatttcatccccatctcatgttcccctgaggcatttctactataatatccttttctaattagcttgttcccctcatgttactggctctctggagttgtcttaaattctagaacttttaaacttaagtccctctttttgcttataatagagtaccacctttatcttcatctttgttgttgttgttgaaacagtgtctcattctgtcacccaggctggagtgcgatcacaactcactgcagccctgacctcttggggctcaagcagtcctacctcaggctcctgagtagcaggcacgcaccccccccaacaccttgcaaatttttatttatttacttatttttttgtagagacgaggtctccctatattgcccaggctcatcttgaactcctgggctcaagcagtccttctgcatctgtctcccaaggtgctggagttaaggtccatgcccagcccgtcttcattatattatctagcattattgttctaacctggctaacactgagttattctgtcagtggacagctgcctaagagagcaggggagggtaagatttctgactactcttactgtagttggtctagagtagtagaggaaaaacgagcatgaaatgggtcctgagagtttgagatgattatcttggggagtgggggggtcctattccctggggctgtcccattaatgtaatagtctggattgtatttgaattcttcacagtatttgttaaaactgccagctgtcattcttgccaggtttatgcttgttttgtgtataatttagataggtattgtgctttgtatctatgtgtggtgatgtaccaattttattagcattaatttaacatgcccacattactcatgagaaagagagtaaatgtgaattattaagcccattccagaacagttctttgccagtagaggttttgcaaaacagtactaccctgtgatttgtccccataggttatttttaaaacaaagttcttcttgatgtgacaaaattaagacaaccctaaaaatgaaaatgtttttaatttaaatttaatttaaaaattaaatgtaaagtatttcagaatatttgccacaagcgtaataccatacttgaaataaatgttctgaattaacactgaaatattaaatattacctaagcaggcaaaattctgtttgacttgaaagaattaactgctcttaggagttgatactgttccttttaatttataccccctttaactttttaactttttttaactttttttttttttaaattaatttagttagttaaaatagagacagagtcttgctgtgttgcctaggctgttctctaactcatggcctcaagagacccctcatgtcatggactcccaaagttctgagattataggtgtgagccactgcgtctggcgctgagtcttaattataatcattcttaccccttttaggtcattcttgcccctttaagaatatgacaaccctgtactcagagtaatgtacatatatatgcaattttgcacacaattttagtaggttctcaaattatctatatctgagcctcttatttcagaatgactgcccatgttctgatttcctcatcaaaactgctgaaaatactgtgtttttagcccaatacctgtgaaagaatcctttgtgagtttaactagttgtagctactttattctactctttcaatagtatactccccatctagatttggaaataatagcataatctgaccatgcaagtaagtattttcagttctatattgttaatccaggttatcagatatagcttacgttttttgttttaaactattggacaagattaaaatacatacaaccacacaggattaggagtagagtatatgctggaagtgttattaaaataaggattaatgttgaaataaggagattttctatatagttattaattgaaatagatgatgataaaattaaaatgccatcatgaggttgggcatggtggctcacgcctgtaatctcagcactttgggaggctgaggcgggtagatcacctgaggtcaggagttcaagaccagcctgaccaatatggcaaaaccctgtctctactaaaaatacaaaaaattagccaggtgggtggcgtgctcctgtagtcccagctactctggaggctgaggcaggagaatcgcttgaacctgggaggcagaggctgcagtgagccgagattgtgccactgcactccaacagcttgggcgacagagtgagactccgtctaaaataaaataaaattaaattaaaatgaaatgaaataaagccatcatgaagcaaatcatgaaacatctggattaaattgtagacttctattttgtggttaaccgggattaaccagaaaaccctttagattccaattcgtgtggctgaaagactttaaaaagtatatcagggccaggcgcagtggcttatgcctgtaatcctagcactttgggaggccaagacgggcggatcatctgaggtcaggagttcgagaccagcctggccaagatgacgaaattctgtctccactaaaaataccaaaaattagccagatgtggtggtgagcacctataatcccagctactcgggaggctgaagcaggagaatagcttgaactcaggaggcacaggttgcagtgagtcgagatgatgccactgcactcaagcctgtgcgacaagagtgaaactctgtctcaaaaaaaaaaaaaaaggtatatcagtgtgctttctttccctggcagaggattttaacaattccccatctatttataattccttgataatttctctgaacatacataatctaatagaatatgaatrcatactagtcttgaagattagctacttatttttgtctttctcctacaagcatgtagctaaattatgattaactaaggttatattcccctctttcagttttaattcgtcaagtatttattgagcattgattatataccatggtggatatgagcttaggatttggacagtgctgtccagcagaacgccctgtaatcatggaaatgttctatgtttaccctctccagtagggtagttttcagccatatgtggctaatgagcttttgaaatgaggcttatgcaacagaggaacagcattttaaattaaatttaaataaccacatgtggcttgtggctaccttactgaacagagcacctctatagatctcagttctgcaaacttaactctttaggaaagcttcagtgagttccttaacctgtctttgaaatgtaaatattatataccttctggaatgttatgatttcatgagttaatgcatataaagcatttgctatagcacttgacatagagtaagacctggataaatattagtgattattactataattgtatgttatgttttgtgccagtatcccagaagggaatacagagaagaaaaagatacataatttccatgcttaagatgtttacttgcctcaaccaacatttcagggttcacaaagcatgctgttgactaggtgatgtgacattttgtatgggccttgccagaaacttccaatagtaagaagctgtgatgtggtagacacagcctgagtctgagctgaggtggggtttttgaggtccttgtccaggcaaggagattggtttttagttttcattttatttgtcaataagtagattattccataggtgcacactatatatttcaaagagtctaaatacaaaaaggtaggttccactctaaaggccttagtttatcttaaattctgttttcaccatatgaattctgttttggcagcagttaaagtttaaaatgttttagtccctgtccttagtgctttatgtgtattatcttgttaaattctcaaacataaccttttatgctataagcccaaaaccattatctgaattccctgaagacagatatatttcagaatcccagggtttttttagattttagaaaggtaagatagagcatataacttcagacaagtgttattagtccactaatgaaacacatggtcacattaaatggaatacctaaggattaaaaatagtttatgaaaagttcagatcacatttttccacaaatggattgtgagatttggtttgacattaaattatgggaattttccattttccaggatttctgacatgtggaattcagataattctgtcaacttgtgttacccatatttgtgcagttgttactggtgaaacctgtatttatactcaggcttgtctgttactaattctcatgttcattctttctacataatagggctagttttggttgaaaacttgcccttaacatcattcaccttatgctgtccaaggtttttatgaccctttaaaaaaaagatatagccttgccctgtcaccgatgctggagtgcagtggcacgatcatagctcaccacaagctcaaactcctgggactcagagtccctactgtctcagcctcctaagtcactaggattacaggcacatgccactatgcctagctatgacttattttcgaaccctcatttcatttcttgttgactgcatattttctgtaactcaaacagtggtggatgctcagtgagtattttttgaatgaatgattcagtccacaggtagctcttttaatagttcctctaatgtcattggaattttctagcacagtagggtaaaaggcagaacaagggcataattcatttgcatagtttgcaaaaagtgccatctggtttcatgataaagtacagtcaaaataggtatacatgaaaactactttatcattattacacatggtgagaatgattgtggagtcagcagggtatgttgtacttacatggatgtatggacatgaattggtacttcatccccttactagatttgctgtaaaacaataacaataacactttgatatttttccgtctttttgggctggtaatccctaattttttctagtggaaagagcactcttgtaggaatcaggagaactgagtctagctcaaactttgctagtcattacctggatcacattgggaggttacaatttggtttggggtactggtatcctgatacttgaagtatgtttaggagagtaaaagttgagctaagttaaattttaagatggccaatttttcctttgagtatttaaactactttcagggcttctttcttcttgcccagggaagcactgctctcagrtataaaaaagacaccccattgtggcacccaccttccctgcactgcyccattatctggaattagttctcttttcaccctggattctgtttctcttagttctgtggctgtcagctgaggacaggaaaactcagtctggaaatttcagatgttaaaacagggaggaaatttggagcagggtgcccgctccatacctcttcatgccttatactaaggattttgcctccacattgaagattagatagacctcagagtattattttgccctcacagatttctctgagtcatagcatccttttctcctttgctgatctcataaaagtcctgtatgttctggttctacaaccctttagcttttcccaaagtccaccactgacctattgtttgtcctttcagaggttgggatttaacagactccttcactgcttgtctgcctctgatgaggttttggttatctttagaccacagcccttggcaaatccacgtctggactcttggtctagatagaactcaccraaccaaaaaattgagggtgaggtcactgcttgtaagagaatacctacttcctttctcagtttgatttttgatattgagtgtgtgctggtagcactgcgcttctcaagtgcttttaaagtaccctggctctgggctgcagtcagagtactgttctctttgtggttgagaaagctgacagcgtaaaggcatgtcactgggggactttcaacttttttccttagccaaragattgggcaggagagagaaacttacagagtgctaggggaagaacttagcagagcatcatgaacgtagcagaaaatggtcacttagttgggtagaaccagagtagtgaaaatgaactcacagcctggatctgaacaatatcactggaaagtaatcttagattaaggtttttagactggtttacactaaggttttaacttaacgattccccacttgagaataaagccttctaacattagatatcttacctgtttgtatgctgtggtaatagagagtgtgggtgcagatactggaacaatgtatatcctacagctgtgtttgcagagctgggcaagagccccaagagagtatgaaaagggatgtttatcatctaaagtggcgagtccacgagtctcaaggtagacattattccttggttcttattttatgacttaggacaaaaacaacagttcatattgttcacattcccctccctagctgctataattaaacccactttggggttatatacgttgtttgtcacccataaaatatttcctaacacagcgggatcactcacagtcttacacttagataatctattaagtatccgtttataaaatattcataaaacaaagtaccactgtatttaattcacctggttatttttaaatttttacaactgcacgtttagactggagcctaaccattgcttttcagttcaaaattcttgtgaaagggatttgaaattatattttaaggaaaaatattctaattattgggtaagactgtgtagatatatagactgtaaagcaaaagctggaattttctttaaaacgtattctttttatgtgctgacaggttttaccaacctcgccagacaaaagggatcatttaggaaaataagaattcactgtctttttccctgtaggttgtccctgtacagccagtcaagtatttctttggtattctgggaccccagtgatgtctcacatgagctcgtaaacaatactcttaataattttcccttttgttcctctcgtctcctcctttgaaggtcactccttgggaagccacttgaatccagggctcctcactattgctcctttggctctgagggcacactgatgcccgtatcggggctttcctggagctgctaagcatgaacctttaaactaccaaagcagtggtgctatgttcttggaagaatgcttactgtctcactctagagaactatgcttgtccttcacatctcactgactcttgaaaagccattcctttggcttcttttatctgcctttttccgtacagccaaatagaaagccatagaaatagtagggttaggaaccagttatctaaagtacactttcyccttggtggtttccttcattcctggcaaaaattttcccactccagcaccgagaactgaccaaccaagcaaacctcacagaagaccatccttcactttatgagccatgcccagaaatttctggatctcactttaagttcagcctaggacgttgattacatttacctaaagtgacaccttacggattgcaaggatttccatctaaagcaattgtcttctgctgttccagtcacatattctcacctcactctatagtcagcagatcccagaacctagccagtctgtgaccatgragcaaagcaaaaccccagatatgtggcattaaccagcttttaccattcttgtaaatatctgagaatagccccgtcattttcatatatctctgtgaaaagaacaactacataacttagcatccacttttgagagggaaagcatttatatccagatgatacatatattattaccataaatatgcataagtataacataaacattaaaaccttatttttaccatgtttgcctacttccaccatataatatgacttgattattactgttttatacayatatatrtatatatttttaaagtctagattccatgcctacaagtttctttctgagaggaattacttaataggtttatgctatctgattagtattaatttttaatactaactcaattttcttgtccccaccagctagaaattttttaatttgtattttcaatgcagatgcagagtttgcggggtggtacagaagcgatagcacgattggatcagttagaagctgattattatgayctgcaacttcarttgtatgaagtacagtttgaaatcttgaagtgtgaagagttactattgacagcgcaactagaaagcatcaaaagacttatatcaggtatggcgtgcatttaaccacataagttcaccaaagattgaatacatgagaaartacttayggactaggtatgtttcttttgttaagacatttaaaaaattgttttctrtagggatagagtgtgggggggtgatttctagcatttattgagcacttactgtttgccagatactgctaaacactttgcatacattcactctatgaggtgtattaaataataatcaccacttacaaagaagcttaagagataatsgctttgcctgaggttgcagagccagtaatgagattagaaccttgttctttccaaaccctagcccatattctttaccactactcttttttgctgttctgtaacagaaaaaagagatgaagtggtataytatgacacttacgaaagcatggaggccatgctggagaaggaagagatggcagcatctgygtacttacagagagaagagctgcagaaacttcagcagaaagcacgccagctggaagcaagacgtggacgggtttctgccaagaaatcctacctcagaaataaaaaggtatttaaatattgcttttgttcattatttagtcttttatccgtatctactaatctcatctgttttgtctttaaaacttgcttatgttttaaaactaagtaagcactatctcttatcagtgctcaatgcgtttatagtgctctgagaattgccctcttaaacacattggaacagccaatagtgatgttctctttacctctagaaacactaatggtgactctgctaaaggcctyractacaggatccctgataatgtgattcctggctccctttttatttaaggaggcccagcgatgttttttacaagccctgattctgaccttaaagaattttatagattgttatttctttatttaactttgattacatttyagaatgtttgattcttgatatttggaatgactcattttgtggaaatgtgattcttcctgtgtcttaaaaaatgttttgcactctagtccagatgttaactatcgtggagctgtttctagtcactgtaagtgtagagttggaatctggaactagctctccaacctagaccaaactgatgactgtgtggtactgattcgctttaagctcaagtattataaaagtatgtcatgttctctgagaacccaccttcctgctcttcaccacattccaaggctaccacttcctcattccacagaaaatcaatacctttgctttttgaaatagatagctcttgcacattaaagaaactcagacaggcatgtatccacagtaagtcaagaacccaggaccttctatcacgttgtccatcaacagaacagttaccttgccatccagagccctggctttcacataattatgtgcctttgctatttcccygtgacagtggtaattgaaacccactgctgtgtcagccctggttgtgagcttcatttcacgttccaatctgcaccaaccaggtaaacattgcaggctgggcgcggtggctcatgcctgtaatcccagcactttgggaggctgaggtgggtggatcacctgaggtcaggagttcgagaccagccaacayggtgaaaccctgtctctactaaaaatacaaaaaattagccaggcatggtggcacgcacctgtaatcccagctactcgggaggctgaggcaggagaatcgcttgaacccagaaggtggaggttgcagtgagccaagatggcaccattgcactccagcctggacaacaagagtgaaactccgtctcaaaaaaaaaaaaaaaaaaaacattgcagtgatttcagcaggtcttatagaacagttttaggggagaatgaaaagtaaataagatttcagaagagcacatttttgaggaatattaggagtattttatatattacttttaggtgtatagtgcagtacttttgagactcggaatttgcaaacctgcaagtttttgaaaatgctatgcaattcagacttaattgaaagtctgatttcattttaattcaccagtatgctaggcacattgttagacttaggatacaaagatgagcaaggcatagtccctgctcctcctagtcttttagagaaggcaaaccaggtgaacagatgagtgttctgccggccaaaaacagcaagagcagggagtgaggaaaggcttctctgaagagatgacacttgtactggcttttaacatctgaatagaaattggccagattgatggtgttggggtaattacaagcaggacagaatagtttttagcaaagacactgaagcagaaaacagcatggtttgtcagagcattctacattgtaagacatgctgcagggcggggaccaagttatgggaaattttacataccacattaacaagcctgagctttgtctgtagtataagttaagcaaaggggtagtatgaacagattcacattttagcaagataaggcagcatgaaaaataggttagagggagaagagatggaaaggttctgattggaaggtgtcattatcctccacctcaataaggttgagaggttaagactatgaagtaagtgggtgcctgtgcagggtaagagatggacaaatcttgaactgtctagatctgacactttgcagaaaaagttagtaggatttagtgatgtggtgaaggagggaggaagagccattctctatcaaccctctggtttctggattgggcattgaggtagatgatggtgtcaccaaccaagatggaaaacccagaggaagagcacatatgggtgggaggtgataagctgagttttagacttgcatataagaggtcttgggcatccaggtagagatggctgtgagacagttgagacaattgggcacctgggtcttataagagtgtatgagatggtctcagaacaacatactgagcaggtgatttttaaaatattttatttatttttttatagagacaggggctcactatgttgcccaggctggtctcaaactcctgagctcaagcaatcctcagcctcccaaagtgctgggattgcaggtgtgagccactgtgcccagcctgaggagggtgttcttaggaatgatgaggtggaggtgggaggctgataggaaagagcaagggaaggtggtggagcaggatagatacatagtttgaggaagaaaaaccttcattgtatttaatatttgtaattcaggaagcaaaacgttcttggctaggggtgagaaagcattgtaaagggcacaggctatgaaagactgagctgctgtgatgtagtgcgaggagaaaggctctaaggaaagaacactggggaacatttgaaagtgtgtgcagaagaacgggatcaaagagaaagggtaatcgaagttggaagaagcaggagagctcgaagtcayagaagtgaagatgatgattccacacaacaggatggtcagtaggctcaggtgctccagaaaggtaaaggaagaaagaaatgactccatgacatccaatattgggagactattggggccttatgttcagagtttcgagaaaagttgtgggcaaggagtagatcttggtggtctgagaagggagtgcagcagaggtttaaagcagtgactgacggaatagcaaaggaaactgtacaggtgaggggtgaagaggagcaaccttggtgaccatggcccacagagctgtgtactcttctagcagtattaagagcttcaggctgaacttaataccggcttaataccagctcttcccttgttgataagtgttagctcatagcaatttaatcagtattcttcagtcttcatttctgtgttaatctaaatctgaagtagggaaacccagccttggagaatctctccatttacacttgtgtgcctgtaccccaagcccagcaactgaggtggcagaactgcagagggaaggagtagtgaaataaggaagggtggtgaaaagataggaaatgcaaaacactaagtcctaaaaagaaaagctactgagaagatcaaatatacaaggaaaaacaaatgtctccctatgtaacataatcctatattcccttgtttacatatcaacatgcccaaggtcactggcttcttggtttctctggcactcatcttaagattgcatacacagttcatgtcctgcctcaccccttgaaagagtggagataggtggtccccggctgtgctggtgaagtcaatgctttgtgattaaacatttcaagaagagtaacaaaaataacaattttctttgktttttatcttctttaattctcccagtagtcaaatgaaatccagagagctcagaaaattagaatcattttcatacttcatttggtggcaaaaccagacctgagctaacatgaagttatttattatcttattctcactttgacaattcatttaactattactgcttattatgggatatggtttcagatcttgcttattaggatatatatggtatatacaacttaacaccattctctaaattatcaaaaaactttgaatttcaaaacatgtctgacctctgttctagataagggattgtggacctgtatcctcatttataagcaagggaaccaacgcttctggtagtgacataaatcacctaaggaaaagcagctaatatggagcaggggtaggattctgtcctagacactcagagacctgagttactgtatcaccaagtcatgacattatctaacacgccctttgttttccccattgcactggatagattcttgataggcaatagagtgaaccagagtgggtaaagaacatgaagtaaaaaatgacattttgctttaaaataacagtttactgacttcaaaggttattatttgactttctctaattgaaagagtgatcattttaggctgggcatggtggctcacacctgtaatcccagcactttgggaggtcaaggtgggcagatcacttgaggtcaggagttcaaccaatctggccaacatggtgaaaccccgtctctactaaaaatacaaaaaaattagccaggcgtgatggcatgcgcctgtagtcccagctgcttgggaggctgagatgggagaatctcttgaacctgggaggcggaggttgcagtaagccagagatcatgccaccacactccagcctgggcaacagtgagactccatctcaaaaaaaaaaagtgatcattttagtatagctttggaatgttggagactaacccttttatctggaaaacttctccaaatagtttccttaggaaaggacacagggtaaatgaagatttagcttggtactggtaaaaagttaccagaatatagtgcataattttataaagtagtgcatatctcacagttattgcaaaaatcctgttttatatggtgattggaaaatatatgcttttttttcatagtttctaaataattttgataattttgactttctagtcttccaggtctcttgcagctcttatgtctgcgaccaaaagattcagatctcatattgtttaagccagtctggacaaaaaattcatggtctttaacttgtcagagggagcttaacaatacatattttatataagtaaatactttcatattcttttttgcccagacatgtttaaagagcataatgaagccaggtgccatgactcatgcctgtaatcccagtaactcaggaggctgagccagggggattacttgaggccaggagttcaagaccagtctgggcaacatagtgagacccccatctctcagaaaaaagtataatgagatgtggaatcttctggatgcagacttcagatctgaaagagacctttcaggacaacccccttcagtccaccttgccccatccctcctccttcaaaaaagagaaaccaggaggtctatagaagttaatagtttcatagaggagtcttttcgtaagatcctgattacttggcttttacagcttcagttgtccaaataagaaacaagaggtggtcaatgtgatactttgttctgtaggtggtatatattaagatcaaaatttaaccttggtgtggtgttcagagtctttcaagtttcacttgtattaaaacacattttatgtatttacaggaaatatgtattgcaaaacacaatgaaaaaatccaacagcgcactcggattgaagatgaatatagaacccatcacacagtacaactagtaagtttggattcgaagattttgaacaaaacttaatttttttgcatgttttagagtggataaaatctgtagagaatgataaaaaaacttataactgcatgttaacattagttcagtttatataatgagcagtttttaggcaaaattgattggagaatacagagttcctataccctcaacccgcacaygtagcctcccctaccgtcaacatctcctatactcctgtccccacacttgatagcctttccactgtcaacatcccccagagtggaatatttgttaaaatcagtgaaacattgaacatcaccattccccaaaatctgttgcttatgttagggttctttcttggtgttttgtgttctgttggttttgacagtgtataatgacatgaatctgctattatagtatcatatggaataatttcactgctccaaaaatccctttgttccgctactcatccctctctctccccaagcccctagcaaacactgatctttttatagtcttcatagttttgcctttaccaatgtatagttggaatgatacagtatgtaacctattcagttggcctctttaacgtagtaacgtgcatttaaggttgctccatgtcttcatggcttgatagctcattttaacaccaaataatgttccattgtgtggatgtctcagtttgtttatccatgtgcctattgaaggacatcttggttgcttctaagctttggcagcaattagtaaagctgctataaacacccatggagggctttttgtgcacataaatttcagccaatttgggtaaataacaaggagcatgaatgctggagagtatggtaagagtgtatttagttttgtgagaaactgcaaaactgtcttccatagtggctgttccattttgaactcccaccagcaatgagtgagagttcaggtttttccacatcctctatagcattttgctgttgttacgtttttgaattttagccattctgacaggtgtatagtggtatcttttggtgtgtgtgggtgcgtgtgtgtgtttaagagatggagtcttgataggttgcccaggttagccgcaaactcctgggctcaagcagtcctcctgctttaacctcctgggactacaggtatggactcctgtgcctggcttttactgttgttttaatttgcaaatctttaatgcagatatatagataaatagatacatatacagagagcgaaagagcgcatcwgtccaaatgcctmcttgcccctctatatatctctagtaaggtgtctgttcagatcttttgctcttttgttttttggagtcttattctgtcaccaaggctggagtgcagtggcgcgatctcggctcactgcaacgtccatctcctgggttcaagcaattctcctgtctcagcctcctgagtagctgggactacagacatgcatcaccacgcccagctaatttttgtttttagtagagatggggtttcaccatgttggccaggctggtcttgaactcctgacctcaagtgatctgccctccttggcctccaaatgtgctgggattacaggcatgagccaccgtgcctagcctttttgctcattttttaaattggatttttattttcttattgttgagttttaggagttcttcatatattttggcttacactcctttatcagatatgtccctttgttttgcaaatattttctcatgatctgtggcttgttttctcattcttttgacagtgtctgttgcagaacagaagtgttttaacaaagtccaatttaccagcactttctatcatggttcattcctttggtgttgcatctaaaaagtcattgccagtccccaaatcagctagatttgctcctatgttatcttttaggagttttatagttttgtgttttatatttaagtctgtgatccattttgaggtaatttttgtgaagggtataaggtttgtgtctagtttaggcttgtggacttcctgttgttccagcaccatttgtttaaaagactgtcctttctccattgaattgtcttgttcctttgtcaaagatcagatgattctgtctcttcagtctatttttgggtgtcctattttgttttgttcatctaggtcttttgcctctccatataagctttagaatcagcttgtcagtagccacaaaaaaattgctgggattttgattgggacagtgttgaatttataagtcaagtagggatgacctaatatcttttttgtttttttcattttaaaatacttcttcttttagtttttttgctttttaattattatgtttattttagcctctaccgccttctcctacacctaacatcttaacattgaatattcctatccatgaacaaagaatatttttcatctatttaattctttgattctttcatcagagttttataattttcctcataaagatcttgtacaccttttgtaagatttatacctaagatacctaagtctttcttcctcttctttgtcagggaggtggtaatataaatagtattatgtttttaattgaaaactccagttgttcattgctggtgtattacaaaacaattgacttttgttaattaagctttttcttaataatctataatctagattttttttgtcagttttctttcagattttctacatctgtcttcagacagttttatttctgtatagcttttatttctctttcttattgcattagctagcacttcagtataatggtgaaaggagtggtaagggggacatctttgtcttgttcctgatcttagcaagaaagctctagtttctcaccagtaagtgtgatgttacctgtaggttttgggatagatgttctttatcaagtagaggaagttccccctctattcctagtttgctaagaatattaggaagttccccctctattcctaggttgctgagaatattagttcactttatataaagttacattagaaaccttctcctactcccatattgctgtgccgcatcccacacaatatatattatcctgacagtcatctttacagatgtgtcttaaattagttaacaccagtaatttgtacttaaatatcagaaatgccaacatgaccatatctctgtatttggatatttctaaaattttctgtctttagcatcatactaaaggccaaagggcttaaatttgtctccattactccttaaggcacattcttagctaatgctgccccttactcttcattttaaccacataaaattagccaaactacccataaactataagattacctttctcctagaatctagaaatagattaattaatgtacttttatttttcattactgtttctgtgggtcagaaactgctttataagattagtcaggggaccagcatgacagtgaggtaagttgctccctgctataaccatttgtacttgcattatcagtttacttatgaaggttccacacttccaatatatttctttttataaaacataagattttggtggaggggaagaactaattaactttttagaatgaatgagtatcagatctttttcccagatctattttttgggggcaacaggagtaaaaattagtaaatcgattatctttcttttccttttttttttttttttttttttttttgagatggagtcttactctacccaggctgaagtgcagtggtgccatctctgctcactgcaacctctacctcctggctttgagccattctcctgcctcagcctcccatgtagctgggattacaggcacatgccaccacacctggctaatttttgtatttttagtagatggggtttcaccatgttggccaggstggtctcaaactgctgcccttgagttatctgcccgcctcgccttcccaaagtgctgggattacaggtgtgagccaccactcctggccaagaaattgattcttaaggtaatcccaaagataaatgtcatctgccttagaattttgcctaatatcttggttggaatatataattgtcagagaatgaatccattaaataactagtcatctttaacacatacagataaagcataatgaaagttagcttagatcaaaatagatcattgtttttcaatgctagttttaaaccaccagtgtcagaacctcttatgtggtggattgtttaaaatacagattcttagatgttaaccttattattgcaacagtttcccctggacatccttgtgaattaaatatgcaagactaaggaagtttattttaatatttgatagtaaactctctaaaacaaaatatgaggattacttattaatactactattttaaattgttattagctcaaattggataagagaattctgttttccccattaaagaatgaactcttattttttgtaagtacactcaaaactccaggctttcacttcaagaaaacatacatggtggctcctgtctgtaatcctagcctttgggaggccgaagcaggaggatcacttgggcccaggagttcgagaccaggctgaccctgtctctataaaaaatttttaaaatagctgggcatggtggcgtatgcttgtcttgggcacatgctaacttatttcaggctctaagagcccttttgaattgtgttcatgtgtggtgtatctttgtgtccttttgtgtaaattagtagtatattactagattgcattttattcagaaaattagcctaccacaccttctttttttttttttttttggtagagatagggtctcactgtgttgctcaggctggtcttcaactcctggcctcaagcaatcctcctgcctcagcctcccaaagtgcagggattataggcatgagccaccacacttggctttattttccagtttcctgttgtctccctgccacccttaygtccctgctcatactttcttgttagagtttatgatacaatcacccaatgcaaatgcaacagtaattctcattagaaattatattgtttagggaaagctggtggggaagaggagagaaatgatagaagaatagaatggggggttggatctgaaaaggacaggagaacaatggaagagagggtagttaatttccatttgaaattatctggtctggtcttctgggaggtatctctaattttttaaaacaaagcaagaaaatagacaacccatttacctatatagaaagccttttcatttatttaactaaaattaattttaccaaatgagattttattatatagcttttagatgattcaactctatagggaaaattaaaagtttgtttagataactgccaaaaataagctgtgatactaaaccakatgattcatggataatgcttgaaaaatatttttctaactgctggttatattggttgttgatttgattgcttttgttcgtttgtttttttgagacagagtcccactctgttgcccaggctggagtacagtggcactatctcggctmactgcaacctctgcctcccaggttcaagcgattctcctgcctcagcctcccaagtagctgggattacaggcatgcatcaccacgaccggctaatttttgtattttgggtagagatagggtttcaccatgttggcctggctggtctcgaacccctgacctgaggtgatccacccgcctcagcctcccaaagtgctaggattataggtgtgagccaccgtgtctggctggttgctgattttattttttaaagtcatctacatttaagttagcataatatagcagctagaagtattttacactaaaactgtgtattaaaaatatttcatgtttcatgctttcatatttcatgtttcatgaagtattaaaaatatttcatgtttcatgaacaaaaaaaaattttgttcagtgaatcatcccctttggcccacattaggataacttctcatcttttttcctattaatgataaaaattgggacacagcataatggaattattattaattttttaccagaagagagaaaaattacatgatgaagaagaaagaaaaagtgcctgggttagccaagagagacagagaacactggatagacttcgaacatttaaacaggtattaaaagtaatggtccatttattgtttttctttttttttttttttaacagagctacatatacacctgtaggatttctttgtgggaaaaacttggttttcccttatttataaactattataaccatggaagtcctttttaaaattgttttaatggcatggctccatttcctctggtggttttccgaatttagtattcttgtgacctttgacccacagcttcagtagtataagaggaatgataagggcctctgggaaacctagattcctcttgagtttaaaaaattagttaaatcacaactgactatccagctcaagcatcagcwtgttatttattccacatacatcagcctgtggtggtaatacatcaaatgaccattggcagaattagaggtggaggggagcagcatatttgagaaatgcttcagcagttctcttgccagggtaagccatgaccacacactgataccacagtatccacacatctcctcagaactgtgctgaagcctcacagttctcatttttaaagtactctggagccttacttcagttatgcatgctgaaggatcactttgtaggtgaagtaggcttttgaacaagtgttacagtggaaaaaaaggaggtgaggcaggggaaaagccttgttattaagtaaatgtggctcacgcctgtaatcccagcactttatgaggctgaggcaggtggattgcttgagccggggagttcaagaccagcctgggtaacatggcgaaaccctgtctctatacaaattagcctggcatggtggaacatgcctgtggttccggccatttgggtggctgaagtgggaggattacctgagccagggaggtcatggctgcagtgagctgtgatcataccactgcactccagtctgggcaacagagtgagaccctgtctcaaaaacaaacaaacaaamaaaaggtcttaccatggtaaaatatatataagagttctaccagtaagtactgaaaaaaatgtatttctctcttcattctgtcataaaatggatatatagttgatggagctttttaaaaatgccaagtaacctgttaaagaatattttaattttctcgtgtgtgcatttgaaaacataggaaactttttgcataccagtagcatttatacatttgacatcacttatgttttgcattttacatgctatttgttttatacatttagtagttttattcactaaaaatctttttttaatcataattttgaatatttgaattatcaatcgtggatttgataggcaaataataaattcataattgtttgtaagctattattaggtactttcggattttctgtataactttaagggtgaaataaccaataagccaacataacatttttgagatggaatctcrctctgtcactcaggctggagtgcggtggcacaatctcggctcactgcaacttccgcctcccgggttcaagcaattctcctgcctcagcctcctgagtagctgggactacaggtgcctgccaccacacccagctaatttttgtatttttagtagtgacggggtttcaccatgtcggccaggctggtctcaaactcctgatctcaggtgatccacccgcctcggcctcccaaagtgctgggattacaggcgtgagccaccacacccggccacataacatcttttatttgaaggagaaaataaataggcatgtgctcataaattgtttcaataacatttaaccagttccaataacttctggtattttagaggtatcctgggcaagtcatacttaaatcaaccagattacgactagctcatgcaagaagaaaaggtgcagcaagtcctgttctccaagaggatcattgtgactctttaccaagtgtgttacaggtagaagagaaaactgaagaggtgggagaaggaagagtcaagcgtgggccatcacagacaacagaaccccagagccttgtgcaacttgaagatacttcattaacacaacttgaagccacctcattacctctcagtggtgttacctctgaactgcctcccactatatctcttccacttttgaataacaacctcgaaccatgttctgttaccataaatccactcccatcccctcttcctccaacaccaccacctcccccacctcctccccctcccccaccaccaccacctctgcctgttgctaaggacagtggcccagagacactggagaaagatctgcctagaaaggaggggaatgagaagaggatcccaaagtcagccagtgccccctcagcacacctctttgacagcagccagctggtcagtgcacggaagaagctcagaaagactgctgaaggtttgcagaggaggagaggtacgtcaacatattttcatggtccatctgttgtatgacatcaggcatagtaaaaaactatattttttgacgttgcaaagcttaaaacactttatttttgacattatttgatagtaaacaggttttcaaagtcacactagaggagaattcttagtgcataaagtacacagaaatgtatgccttcttgggctgttaggcatgttttaaaaacagatcttctaaagtgatacattcatgtttggtaatgtataatgggtggctccttttgtgttagggaaaaagttttgattttaaacctgagatttttaaaaaaatactcatatcagaaagggtaagatatctggtaaggactgtcaccacagggaagacattggcaggatcatgtaacatttgttcatacatttgttgaggacttttgtgtatttgtataaagaagcaaagaagaacagggagtaatctgttcaacttacaatgtgacagatgtgcctcaataaggttactatttttttttctaattttttttgttaagagagattcaagcacaaataaaattatttctaaaaagagcagagaataacccttgccttttgcctttaaggaatttgcattttgcatggggagaacattatataaatgttacatattacttgtatattacattttaacctgaaggaccattctataaaacatttcttgatgtaatctgagtaggatttcacatgtaaaacaactaaatgaaaaaagcacagtctccataataaacaaaaattaatttttaaaaacaaaatgtgtaaccccatcactctgaatttgggtggagcaactgcaatatggaaatcctttgggaatcacacccataatactactaagaccacctcccagttcccaatctggtcacttctctcatgtaggaaatgataggaataccaacagtacccaccatggattgggtcttgggattttctaaaaagaaggataattaggatcccttgtgttctgatcaccttctgcacacatttcatgatccattttgaagatggtgtttcagcgtcctgtgctttcacagttgcgaacggtagaggttatacagtttcattctaattaagtgcagtcctaactgtaatactgttctgtttcattttccaaagtgagctcacccatggatgaggtgctagcctccttgaagcgtggtagttttcatctgaaaaaggttgaacagcgaactctgcctccttttcctgatgaagatgatagtaataatatcttggcacaaataaggaaaggggtaaaattgaagaaggtacagaaggatgttttgagagaatccttcacacttctacccratacagaccctctaacacggagcatccatgaagctcttagaagaattaaagaagcatccccagagtcagaggacgaagaggaggctttaccttgcacagactgggagaactaacaagtaaacggccttattgtctttagtagcattcagtaatacaggttttatatcggatgatgaggtttggggtattttttattgagcctgaggcatatcgtttgttttataacccaattttagcatggatcacaaatttatgaacttcaggttttacttaattctgtagtttctagaaacttaagataactttttaatgattattgctatgtaaatactatttttaaaaatgtcctcctcattaaaaatttctgctatacagctgtaattgcaagtaaagtgacagtctcattcttgccctaaaaaaacagaaaagggcctggcacagtggctcacacctgtagttctagcactttgggaggctgaagcaggcagatcacttgaggtcaggagttcaagactagcctggccaacatggtgaaacctcttctctactaaaaatataaaaattagccgggcgtggtggcgggcatctgtaatcccagctactcgagaggctgaggcaagagaatcacttgaacccaggaggcggaggttgcagtgagctgagatcgtgccactgccctgggcaacagagtgagactcagtcttaaaaaaaaaaaaaaaaaaaaaaaaggctttccaggttcagtggttcgcttctgtagtcccagttactcagaggttgaggcatgaggatctcttgagcccaggcgttcaaatccggcctgggcaatatagcaataccccgtctgtaaaaagaaatcaatacgtcaattttttttttaatgcaaagccttttctgacaaagtatttcagtaacaaactgttatgcacactgaattttgatgtcatgttagctgacctcaaaggagttttctaagatcattctggaaaaattgttgcattgtctgattatttaactttctaaacccttaaaaaaaactacttattgtcacagttactgtattatctagacaaatttgcaggtatcattaatatataaaaattatctacatatctaatgaatactcctatacatattaagattctctttggttacacatgtagcattctcctaatataatagagagctatagtctactacattttaatatactaattatagagtaatatggcacagattacaccaaatatatagaaacattaaagataacatggtataaattaaacagtatatcaaatttataatgatggtaactgaaatgttgtaatttgtataaaatttatagagtatacaaacatgttctattaattattattctttcttgatggaatatgtttctctaggcttcaaacattcaccaaagtagggaagacttgagtcctagaagggaataagtaaaggaataattaattcatgtgttagccctgtgaattatttttgttgaatttctttttttattttagagacagagtctccctctgttgctcaggctggagtgcagtggcacgttcatggctcactgcagcctcaaccttctgggatcaagcatcccaagtagctgggactccagacacatgccaccatgccgggctaattttttaatttctttgtagagacagggtctccttatggttgccccgattagcataataattcttaaaacatgtttgatcataagaattaacttggggagcttattaaaaatggacattctgtccttgacttaagaattctgagtagaacaacaaagaaaaaaaatctttttttgacagggtttcactctctcacccagggtggagtgcagtgacatgatctcggctcgctgcaagctccacctcctgggttcaagtgaatctcgtgcctcagcctcctgagtagctgggattacaggcgactgccatgatgcccggctcttttttctttttttttttttgtatttttagtagagatagggtttcaccatcttggccaggctggtctcgaactcctgacctcaaatgatctacccacctcagcctcccaaagtgctgggattacaggtgtgagccaccatgcctggcccaaaaaaaagaattctgagtagatctaatgtatatgcaagtacacatctagattttgaagacataatataaaaatgtaatgtatgtcagtttttaaacaactgattacatattgaaagattctattagttacattaggtaaaatattactgaaagcagtttcacctgttcctttgggtatgggttcattaggtaaatattcctgtagtacctctccaccagcatctgcatcaatcaataacttaaaaagggtaatattacattcaccatgattcagccaacattcagtagtagcattatcctgctttttttcctattatgtatacagttacatgtaacagtcactttgtatgacttatgtttttggatcccaaagtaacttcgagttatttttgcttgtacatatgtccactatgctttgtaaaggaatatatatatatatatagagagagagagagagagagagagagatgcatatcagtttgtgaatgtctagactctcaggtatgtctaactgggaatcttttccatagtggatatttgtaggttgtctcccactttacagttcttactaccatgtgttgtttccttctgctgtagcttctcaggaagctgcttaagcttgtgcctaaaactaccatctttgcactgactaattccacagctggaccttcacataaatgtgtgtttagctctttcattacagatggtccacagtggcccattcacagcacaccagcagctgctcaagtcagcctatccttgtctgtctcctcccatcccaccatatcctgcctaaccctagacattgcatcagcattttgtatactcaagtggctgggatgttactcatagcttctggctactaatttagccttagtatcagatgttaacatggtgcatggtgtatacactttgaaaattgcttaaaacttttttcgggggtgtgggagacggctgatggctggaatatgtggtacaatgttgagagagaaacagtgaaacacttagaaaatatatgagcttggaagtttgcagtctccctttactaaatgtgtgctaacccagaagcaaaccatagactagtatggactgattaggcagtgatgaagtagctgtgtatcactactttgtgatcatggagactaaaaggctgtgaactttttatctacaaatggctaagaaggctttaccgcaatttgtatttcccattaatttattagattcctttttttttttctctctctttttttcttttcttcaagactgagtttcactcttgttgcccaagctggagtgcagtggtgtgatcttgactcactgcaacctgtgcctcgtgattcaagagattctcctgcctcagcctccggagtagctgggattataggcgtgtgttaccactcccagctaatttttgtatttttgtagagatggggtttcaccatgttggccaggctggtctcaaactcctgatctcaggtgatccacctgcttctgcctccctaagtgctgggattacaggtgtgagccactgtgcctggccagatttcttgattatagattttgtcattaatgtacttatatacttttaagagctaatttcttgaatattcataaagtaggtaatgaaggtcccttgttctgccttgttcgttcccctctgaaactcttctctttccagagatagccatagtcatgctcaaggaaatttcttaaaatgtatgtaattacatagaggtttaaaataagtttcaggctgagtgtgaactttaagtttcaggcctgtaattctgcagtacttcaggaggctgggggtgggtggatcacttgagcccaggaattcaagactagcctgggcaacatgatgaaacacatctccactaaaaatacaaaaagtagctgggcgtggtggctcacacctgtagtcccagctacttgggaggctgaggcaggaggaaatctgtctcaataaataaataagcttctagtttgtttcctgtgagagtcttttttttttttttgagatggagtctcactgtgtcagccaggctggagtgcagtggcgccgtatttggctcgctgcaatctccatctcccgggttcaatctgggattacaggcgcaccaccatgcccagctaatttttttgaagttttagtagagaggggtttcaccatgttggccagactggtctcgaactcctgacctcaactgatccaccctcctcagcctcccaaagtgctgggattacaggcgtgagccactgtgctaggcccctgtaggagtcttctaaagtaactatagcaatgtagttcaaaggaaatatagtttgagacatgtaattttaaaatgtccaatagtcacatcaaaaatgaaaaggaacatgtgaaactgatgtttgtaatattttatttgacacaatgtagccaaagtagtatccttcaacacataatcaacattaaaaactaaggacattgctttctatttctttttttcacactaagtcttcaaaattcagtgtatgttttatatatactagtagcacatctcagtttgaatgctaaggatctgatacttaatgagaaatgtcctaccaaaacagcaaaattgtatttaatggaaaaatagtacttactgttttagatttttaaatcaaactggatttaaatcaaactagatcagtcacactagacacatatcaagtgctcattagccacatgtagctacagtattagaaaatgcagaactgtattaagttggtactttattcatgttcctgtcagcttttatctgaagagtatgtcttttatataaatgctcctgtgctttgggtacgccccatagatcttaagcacaacacttttcaataaaatgcccgggtgaagtatccatttaaagattggtattaatcctgtcctctaaatgttagtctaacaaaaacagtttctactgcattttgaagacaccatttagttgttcttactctagtagcagtttatggggcaaatagtttagactgaatttacctttttagtatatagttttcatacagtgttagagtaaaaataataaaaatgaaaatctaatagtcttttaaaagtgatcaaaatctgtatttagattattttgttttcatttttactgctttaagaatacagtcatggccttttgtaaaaaatgtcttttttacactttttgagggaacgtaaatacactgtatctttaaagggtcttttttttaatggtctgtattattttgtttgtaaacaggtgacataacagaagaaaaatatcattcaagattggttctgattcttttggaaaatgacagtttaagcacttggttcctcagttggataacattagatccaaagtkcattggttcagtggtgtgaagaaaggaagcacaattggcaggttatcactttccagtcgttccaatagatgatggttaacatgaattttacatgtgcaatgttcctgactgcaatgaagaaaaggccttctggagatttctgttttttaagcacattctccttccatccacatatttacatccttgtaatggccagttaagctagggcttgctgtaagttggaaraacactgggttgacagagatctactgtgagctgtattgggactgctttgagaaccatctttcaatgcactgaaaagtcatctgaaaaaatagcttcttccatatcagcttatattaaatactgtgacactctgagaaagtttatcatcatgatagctgtaagtcaggcattaaaatcaaatggaaatacacctaaaatgtccgcattactcatttccaaaggatttttcataaagatgttcagcaacatctgaaaagctgcatttatggagatacatctattaatatgttcacaacatgatacatttaacatggcatatttttaggagtcttatactttgtaaggttttgaagtttccgtgcttttaaatcactcttcatatttcttgaatttataatagtttgaattttatgtgcatccttgtttatggaaggcagtactttgataatatttcaaattatttttattttgtttgaattattgcttgattgctatgactgacatgactttcctattgagaatcaaaaatcaagattcaatcatagggatgcagatcttaactcttttcacaaattaccattttaagtttttatttttatgctccacagtgaaaagcatgtgctctacaaagatagaaagtagagacaagtctccgtggctggcatttcaccatcttcacatgcactgaatggaattttgggagaatgcctttgttatagtcactaaaattttaaacttatacacagctttaggtgctgattttggctgtgatggagtcctgaaggacacatttatatgttccagattttcagcaggattgttgtgggcttgaatacatgtagatcattggactcagtgtgcagtaccctgtacatataattctgcataagacagatcttggcctttctgtggagggagttaagaactaaaataccaaaaatcactttatttcttttaagacaattatctggcctaaacccagaaagcagtactggagcaaaagcccagtgtatatgaattggtattcctagagaaaaaaagaaatgctcacacctttgttattttaaagtgttttcttgaaaataattagggagaaaattttctggcaacaggttatgtaagacaacaactttttttattatttcaaaacaaaacaggcacatgccaccatgccccagctaatttttatattttttatagagacagggttttgccatgttgcccacgctggtcttgaactcctggactcaagcaatctgccagcctcggcctgctaaagtgctaggattataggcgtgagcctctgtgcccagcctgacaaaatcttttatttatttaaatgttagtaatacgtttattgatgagactaggagcttctctgcagcatcttcataatacattggttttagttcccacactattcccacatcttatctgggaagattagaaatacagatgtaatatggaagcttcaacagcatgggggtggtgatagtgtcctatttgcccttggtaaaatattaaagcgtatttcttaacccaaagagtgattggttatatgaatatatttgaaaaagttaaagcaaatttgcaaacctttacaaaatcatgtatcaattttatgctatccagtttttacgtacccatgtgtcaacatttcatatatccagttctttgggtgctggttcactttttttcatttattcaaattcagaaaaatacggacggatctaatgttaaattaaccagaaaccctggaacattcatatcttgagagggaatttgctactcttttacttttgggatttcattataaaataggctcattttatacatatgtcctgtggtctgtcttccagagtgtgctgtaatcataagtctctagcaaagagtggagggtggagggtgtgtagaactccactcagcctcatggatacatctacaagtctctcaacccatcctgttacagttctccatgagagtcacctcacacttggaaaagaaggaggttaaagcagagtattgttggcagccagctatgcccatcctcttgtaaataactttccaacacacccatttccttgccttaaggtgcaggttcctacttctacaaaatttcaaatgattgcaggtcaaaaacctttggagttactcacaaataataataaaatttcaaataactagggtctacttgtccatcaagatgacattaccagtggaacccacctgttaattttaaagtagcttcagaacccaacaaaaattatgtaagcctggttaaatgtccttttttcttcttgcctctaataaaatcaggatcttcggccttgatactaaatatgtgtatatttagttatgatggtacttgtagatgctcacatttccagttccaaactcgcccgtactttttatgtgcttcaaaatattggacacatttctgttaatatatgatttctgtatccacaaaccgctgtttgcttatgctgagtcaatttagaagttaatttccaatctagtctcaactgcaatgcatttaaaataggtaaaacaagtaaatgagtttgggacattttgagattaatgttactgcccacttgactgtcaatttcaaatggctcctaatgcaaccaaaattataaccaatgtagcatgtgtaggaaaggtatttttaattatttaaaatcattgtgtatattacagcagtatgaggaatgcctggctaaagaggattttttaaaagatgaagaatggttttgcttgtattatataggcttactgagtttgtgagcagcataaaaacaatcattccttaattcttcattgtggaactgaaatatttctgtaatgcattttttaaaaggagactcctagacacagctgtaatagtgggaatagaaatgtagagcttttctcataacacaaaaccagaaaataattttcagcactttgacttactctatgtaataaggaaaaaaattgtttccacaaagttgaactatgtagtaatatttggtaacatatggcatggccactttatatcacagaatgtgtgtcaagttgcaaagcatacttgggccatagcagacactaagaattaaaactcttaaatcagtgaaacaaaaactaatgggcagcattctctctgtttggaatgggatcagtatacaattaatacaatttaattttacacattccctaagacaccatttttaagttacagtcacatgagtgtttgtataaatttaagtcaatgcttttagcctaggcaaagctaaatacaaggtttttggggttttcttttttcagctttattattgaagtattacaaacttaacatcagataccaatgtgtaaaaagtactattgggtccttaagggctctatcagggagttgaaatttcatacgctttaccaggttacttgtaaaaaatgaacagctgtaagacatttcaaaaccattgcagacacattgttaaaatgcagccatttgataatgaaagcagaaaccttaagttttacctaattattgcactaaatgtaaatgataacataaaattaagtgtgcattttaaacagattctatttcccacttactgcttagcatagaaaaagagctatggttagaggagtgaccagcaagatttatttcagatggaaaaggggtgagaaagtggaagcaccttactgttagagcatgttgcatctatttagtgctactgaacaattcagtagttatttctgaactttgctgcaaagtgctctttagttaaagcacattaagaagggtcactgcttaattgctttgtaaaatgaagcaatggtattttttatccgatatagtgtaatttaaaagttttcctacaaagtgagtttatattgttgcctaaactatgttatgtaagcaaaggktttggaaaggcgggagggagtctagattcggcgagagtgtgcgtttgtgtgtgtgaatgtatgaaaagtttccccattgggttattcttaagatgtgtttattgtaaagttttctacgttttgcccacagtaaatgtacaacttcgcaattgtaggatttaattgattgaattccaaatttatactgtctcttcccttctgcagagacattatgccactgtaaggtgcatgtacagaaaatacctctgaggttgacttgttaaataactgatgaatgttatttcacactgaatctcaaagcagtcatttgttttgcgggttaggggaaagttttgttttttgctggtgttttttgttgtttttaattaggcacactaagagtggctaaatttgggggaattggtggataggaaagaccttgaaaagtgatgtgtagatgaaaacacaaggtatggatgttggttacagagttcagttttaacaagggaaatttggggattttttttttttttacttgcatgttctatgggtagctatcaaagggtgtaacaaattattccagcttttcccaatactaattatattggttttaaaaagtctgcataatcactaggtggcattttcccttcatttgtgaaccaagaggggtaaatgatgctacccatacagtgacttctgagttctttaactttgacagaatctccattgtttcattgaatttctcattgtattatatgtctttccaagtgtgcaaactataatatgtagttaatgaaaaatggaaggctgcagattattttgcatgaataattaattgcccattagggctaaggagactgacatgatttttatcggttctgggtaaatgaaaattttaatggaaaactcattcaccatttactagctttgtgcaatattataaaaggtagaagcaaaacactagcacattgtgctttgcttggcttgtaaggatggctttagtaccattacattaaatggacagtgtgcacagtgtattgtaaatgccaactcttgcaaatttacaatacttaaatatgttcaattaacatcctaaagtattaaaagtacagaggaaaaactaagcaagcatttatagcaataccatgaaatctccagtaatcgttttgactgttgccttttgctctttagtgcagcttttctgcattgtaattgtattgctttgtatttcatgttttttacactcatgacttcagagttaagtacttgtacaccaagtattgcaatcacctttctcttgttgtacatgcaatgtaacaacctacagttttggtgcttttaacaatattcctctttttctttaataaaggatatttatttgaattaattaacctgattttgtttgtttaaaatatcagtggtacatattttcacttcatttcaaataggaggaccatagcaagttgtatatctgttatgacaaaagttataacatggagaacaggatccagagaccatccatgcctgtatttctgcctcttcctgagcgctgtttgttgtgacatattttgatggcaactttctttgtgctattaatgaactttctcattgtttataaatattcacaaagtttggaagtgctgacttccaaattggaaaatttttaaatgggggtggggagaggcagaaaaatatttataaagttacacactcagatcaaatagatcaaaatctcaaaaatagaacagaaaagaaaagaagaaaagaaacatagatccccaccaatgcctcagcagttgtttgtctcacttccagtgataccctgaaaactgtagtatctgaaattttcccttagtctcaggaatttctacttacacgctttcagagctagaacattccagtgaccgcagccagtttgatctctttccaccctcagtaaatgtcttgccatattcctctggtgatctggagccctttatattgaaatgtgcaataatgattttaccaagtcattgcaagcttatgaggaaaatatggttttgaggaaaagccttaaacaattaaatatactggccaatttctgtcagaactgtttaataccaagaacaattgaaaggttattcatccccaagtgcatcaacagatgttttgtgtaatgaaagactggtgagagattggaaaactccacaagaaaccttatattgtttgtaaacatttttcaatggaagggaagtatagcaggaattaatcatatggttattcttaaaactttgtataggctgggcgcggtggttcacacctg

SEQ ID NO: 8810 - DNA, 34454 bp, Homo sapiens
  misc_feature (1)...(34454): n = A,T,C or G, or insertion/deletion polymorphism (see Tables 1-2)
tgcctcagcctcccaaagtgctgggattacaggcatgagccaccatgcccagccactagtagtttttaaaccatgctgttcaaagtccttggagtgtaaagaagactttgcagagaggctgaacggctgtggttctgctcctcctcccttgtcccccaacttcaaggaaggaggaggaggtagggtgaagagcaggttgggaaaaagtgggagttcccaacaagtttcacaccagattaattccacgttcatctctttcattttaggctttcattcaagatttagtttgaggctgggcatggtggctcacacttggaatctagcactttgagaggccaaggtgggaggatcgcttgaggccaggaattcaagaccagcctgggcaacatagcaagaccctgtctctacaatgttttaaaacttagctacccccacacctgttgtagtcctagctattcaggaaactgaggcaggagggtcacttgatcccaggagtttgaggctgcagtaagctatgatagcaccactgcattccagcttggcccacagagtgagaccctgtctctagtggggggaaaaaatctttagtttaaaaaaaagatttcatacgtaaaactatgaaaaccacttgacttcaccaatctacttctacaaccatctatcaaactgggaatcactagatcacatcctcatgtctagtccagatcccaatattctatagacacaatcatgttcattgcactctacataatagtgagatggtgtataatacagtgcttaagagcccccactctggagccagaataccttgccttgaatgccacttctaccacttattagttgtatgaccttgagcaagtcaacctctccacacctgaagtttttcaactgtaacatggaagaaataatagttcttcaaaagactattgtgaaaattaaataatatatatatagtatgaatatatatatagtataaataatatatagtataaacaacatcaacaagaaacaataacttagaacactatctaacactgtttttattgcagggaccccatagtatgcctccctccctctctcctctaacagaacatagtacactgctgaagtacagcttgttttgtttaaagcaaattgctgaatttcatttccattccagagacaggaaataaagtcagtttgtctcacggaaaaggatgtgtctcaaaaatttgacttctttatttttaggcgtgtgtgggaaattattactgacaggaaaattagactgaatgcagtaaagtagcataaaattcctcatcattccacaggtttggttatgctccaaaccaaaacgcattccttaagtataaaggaattgttacacacctctaagaggatgacaaaacctatagttgctgctggcaactatgttccagttctattcctaaactggaagttgtaatgaactcagaactgctcccactgaagcaatgtaacaaaaaaaaatggagctggcagtttaccgatggtcaccctcagccccacagaactcttgggtatgctgtcttctcaaccacaacttactgtgggcattgaggcattgaaggatgtggggtgatgaacaggttggaaagaggtgggagccccagcaagtttcacagcaaggagagagacctgctatagcagaatggaggtaaaggctttctggacaacaaggagccaggcacagtaatctgtgtacagttaagtcctgtacagcgtcatctgcttcccgcagagcctcaggtatctccaactcaatgaactacaagaaatctcctatttaaaaagtacctttgtaaatttgatatttggatcttagaatgatttccactaaaataatgttgtaaacaatggttaagtccctaggttagctccaactgatgtggtccatgatatagctgaaatatttgcacaccaatcattttaaaggacataaaaaacaggtggggggctaggggagggataacattagaactacctactgtaggtgacgggttgatgggtgcagcaaaccaccatagcacatgtatacctatgtaacaaaactgcacgttctgcacatgtaccccagaacttaaagtacaattttaaaaaaagacatagaaaacaatatttttgctaaaactaaaacaaaaatagaattcagtgaggctagtttatcttatatgctggtgcctgaagaaaagcatgcttaattagagaaaaagaatgagtagatagacttttcccattagagggaatttctgggcattttccttgaaggctgcggatgatgatacaattgagatttttattatcgttttcctttaaatttagagtttgtttcctgatgatagaaataatacttgttcatggcagaaaatgtacataagccaaaagaatggggtaaaaatcaccatcatcacactacccagaaagagtaagagtgtaaactacacaagctgctttcaatgcctagagtgatatgtaaattaatacttttctttttttacaaagacaagattatactatatatacattgttgtaatattattttcactaataacattttgtgaatgtttttcatgttaatatgtattcatctacatcattattttattgtgtggcattttattttatggttataccatgctttattcaatcttttattgtagacgtgtgggtttttcctaccttttgactattataaatgtttagctacaataaacattcttgaactacatttttgattacttacataaaaactttcttaagaaagtcataaaaataaaggcacggtggctcatgcctataatcctagcacttcgggaagccgaggtgggcagatcacttgaggtcaggagttcgagacaagcctggccaacatggtgaaaccctgtctctactaaaaatacaaaaattagccaggcgtggtggcgtgcacctgtaattccagctactcaggaggctgaggcaggaaaatcgcttgaacccaggagacagaggttgcagtgagccaagatcaccccactgcactccagactgggtgacagagcaggactccatctcaaaaaaaaagagtcactgaatgtttccgaactgagaatataatgatcaagtggtttttcagaagatttaacctggtggtattatgcaatatggattggaggcaggggaaataattaggaatctattacaattatccaactttgaggtaactcatgacttatcaggtagaattacattggcttctaataataaaaaaaactgactaatcagtgactaaaacaaatttacttttcccttttttttttttttttttttgagatggagtcttgctttgtcaccaggctggagtgcagtggtgtgatctcagctcattgcaacctccacctcccgagttcaagtgattctcctgcctcagcctcccgagtagctgggactacaagcatgcaccaccacacccagctaatttttgtatttttagtagagacggggtttcaccatgttggccaggatgatctcgatctcttgacctcgtgatctgcctgcctcggcctcccaaagtgctgggattacaggcatgagccactgcgcccaaccatttttcttatgtatcaagaagtcttgctgggtatggtgatgcatgtttgtactcccagctactcaggaggcttgggtaggaggatcacttgagtccaggagttctgggctatagcaatctatgctgatcaagtgtccacactaatttcaacatcaacagggtgaccctccaggagcgggggaccaccaagttgcctaaggagtgaactagcccaggtctgaaacagagcaggtcaaaactcctgtgctgattttagtagtaggatcactcctgtcaataaccactacaccctggcctgagcaacatagtgagaccctgtctcttaaaaaaattccttaattaaacaagaattctaaatatgggaagtcctggactaatatggtggctttaggatgccatcagggaccctaattatttgtttctgttcagatagtcttcatgtggctcttgtcctgctcaccatttgtgttaaaacaatggttggtttggaggcccctatccacatatttcctttttcaggcaggaagaagaggaagggcaaaaggcaaaacatatgccagctgagctggtcccttttaaaagaacttttggagacatcccacccagcaattctgcttacatcactttggccaggctgtgtcaaatggccgcttctagccacaaaggattctagcaaatgctgttttttggctgagcacattaatgctcaaaccaaagaagtttttgtttgtaagaaaggtagggaaaatgatctctgggtaggcaactagggtatttacacaattggaatgagaaaattggagtgtaacttatataaagataggaattactgaaggagaagcaggttcatggaggaagatgcttggtttggatgtatcaatttgtggatactgttgggaaatccaggtaaaaatgtaacaaaaaggagttggaaagaaatgaacaaatattttggttcagtaacacctttgtaatgtgttgcaatattgttgattgagaggttggccataaggctaagcactaaaatattgttaagttttgccaacaaaaaggcttgtcccaattttcaaaaagaaatagttaatagtaaaaagatcatttggtctatgcccataattctgttgctaatctgaagtgccaagctcatcttcaatataagctgttataatttaaaatttctgctgagtctagcagcgtactttctttacctagcagtaactatcaaatatttagtcataactggccgggcgcagtggctcacgcctgtaatcccagcactttgggaggccaaggcaggtggatcatgaggtcaggagatcaagaccatcctggctaacacagtgaaaccacatctctactaaaaatacaaaaaatattagccgggcatggtggcaggcgcctgtagtcccagctactcgggaggctcaggcaagagaatggcgtgaacccgggaggcagagcttgcagtgagccgagatcgcgccactgcactccagcccgggcaacagagcgagactctgtctcgaaaaaaatatatgtatatacacatatatatacatatatacatatatatacacacacatatatatagtcataactaagactgtgtgttattatggaaagagcgtgagatttgggtccagagagccttggctttgccatttatgatgaacagaatgactttgagcaagatacctgtcagagccccagttttcttatttgggaaacagggataaggtattacttgccttacaggattgtaattagtatcaaatagataatgtttgccaaatgttttacatacaataaaatgttatacaaaacaaagctattgttcttattataacaataggtagagaagtggtaactggatactctggaggacagttgagtttctgtaaaagacttgaagtaaatttaacacttaattcattaaactgtcaactgaagttctgctaagtcagacacattactaataaaaacatgcattcctgagcgtgtgtgcgtgtgcgtgtgtgtctgttgagagcttgatgaatgtaccagcatattcaccaaccacagaaagctgtttgcgtgatgtgaaaccctgaggatcatagcttcagaaaccggaaagacttcactgtatttcactagggtgggatatcaccatcagtggtcctacacttgccaaagatccagtctgtaagaagatttagagagtattgaaatgcaatttttggcccaccacagatatcttctaatcccaaagtaaagactgaaagcttcacctgtttttcactatcaaatgcctcaagctataaataggtccaaagctcatctctctccacttagcagagaagaatcaaatttccgggggcaaagcaaaataataaaatgaatgtcaggatattttatagtgtcagtcagtcaccccacagtctcctctctcttcttttctactgtgctatcctagaatcaaggatttcagcaacaatgcctctgttcaaactcccaggtaggtgtacaaagtgtttggagagctcagttgttgttgttttttttttttttgacaagcaactgttcctttagctaccatatcagctttgatcattcatttagggttcgtgatagctttaacatacatttcaggaaaacacaaaatattttcaagggttttttgtttgtttttagttttgggatgtgggtaagtttctaaaactgttatcatgtatattgcatctttgatgatcccagtagaaaactctgtgaaatatttaatatctattctgctagtctaaacaaaacctgtgctgccatagctctgagacggcttctacataatgactctagctatggtattggctgaaaatcatgaacatgacaaaaataacccatgtgtgtattctgatggttcacgagaatagctttctgttgtccaggtttgtacgcagagtaatttttaaaataataatgttataatttttaaatgataaaagcaatacatgtttcatgtgaaatagaaattgtgctgaaaaaataaaagtaataaacattcgttttgaaagttgggaaattcagtaaaagtaataattttattttttacttatttatttattttttgagacagggtgtcactctgttgcccaggctggagtgcagtggcacgatcacgattcactgcagccccaatcttctgggatctggtgatcctcccacctcagcctcccgagtagctgggactacaggcacttgccaccacgcccagctagtttttgtattttctgtagagacagggtttcgctatgttgcccaggctcatcttaaactcctgagctcaagcaatctgcctgcctcagcctcccaaagtgctgggattacaagtgttagccactgcacccagccaaaagtaataattttaaaaatctgcacatccattatccaaagatattcactcttaacattttagtgtttttttttcttttcaatctattttctgtgtaaaattaaagagtttttttttaaaaggcactgttattatattgcacatgtaattttatatcctgcttttggcaggataatgttttggcttaactttacaacttatccttttaccatggtatcccaaacctttcctaaaaaccattttaaaagactgcatattctattttcttaattaatcccttaggttctttatggtttgggggtttttttttgtttgttcgtttttgtttttgtttttgtttttttagagacagagtctcgctctgtcacccaggctggagtgcagtggtgcgatcttggctcactgcaagctccacctcccgggttcatgccattctgcctcagtctcccgagtagttgggactacaggcgcctgccaccacgcccggctaatttttatatttttagtagagacggtgtttcacatataacacagtgaatatctgtattagccaggatggtctcgatctcctgacctcatgatctgccagcctcggcctcccaaagtaccaggattataggcgtgagccactgcacccggcctctttatggtttttttaagtataagtatgttctgataacaatattgacacctaaagctttttccatgtttaaggatgatttccgtaggatagcttctcagaaatggttgtttggtaggtgttactaaattgtttaccaaatgagctgttttaagtttactactaccaacatcatatgagcattcccatctttcttcatcagatatttttaaaaatcatattttatagagagtgccttttaaaaagtatacttataaatgttaagagacatattagaaaagaaaagaaaatgaagagctgtataatgaccatattcccaagctttctgatggcagaaaactgtagacaagctggaaggctgagctgaaataacagcaatctacatgtgtctaccccaaagcagtgattaatagccaccatgattacagaaagttgttcacatattttatcttgttttattttacttcatacagctgaagagaaacgtgagtattgcattacttttgctgccatttgtcagagtatcaatttaaaaaaatgatactattccttaattcagaaacatggctatttttcagcagtgtttattaaataatagccttgaaagtcaacaaagattcataatgaccatagatatcccatagcatagcaaataagctcatggcttttctggattctagtgtgtgtataaacatatatatatatataattatatataattttttaaaagaaaacctcatgcagtgcttttacttacttayttatttatttatttatttatttatttatttatttatttattttgagatggatggtcacccaggakggagtgcagaggtgtgagctctgctcatcgcaacctttgcctcccggattcaactaattatcttgcctcagcctcccgagtagctgagatgacaggtgcacaccaccacacctggttaatttttagtagagacagggtttcaccatgttggccaggctggtctcgaactcctgacctcaagtgatctgcccgcttcagcctcacaaagtgctgggattacaggtgtgggccaccacacccagcctgtttaatattttgaaataaatgacatagattagccaaaggggcctattgaatcttgccttagtaaagcaactccagcgcaaaaaaaaaaaaaaattgttgttcatttttgtgaccagataaaataaaaacctattttatttatttgtttgtttatttatttattttttgagatggagtcttgctgtgttgcccaggctggagtgcagtggtgcgatagctcactgcaacctctgcctcctgggttcaagtgattctcctgcctcagcctcctgagtagctgagtttacaggtgcccaccacccatctgactaatttttgtatttttagtagagacgaggtttcaccattggccaggttggtctcgaactcctgacctcaagtgatccacccacctcagcctcccaaagtgctatgattacaggcgtgagccaccgtgcccagccttaaaaacctatttkagataaaactataactttggttgtatattcccctcaatctcaaattagacttgtccttttgctgactgatagtaggtctgcctctgaattcctttgggagatgaaatgtggcagacgaaggcctacaaccttgtctttcctacacattaataaagcactgctgagaaacaagcatgtttttctggacctgttaagaagaaagcatgatattcatcttctcaagagtcttgcacttcctgtgttaataatagtaatctccaacttctggacagtactgcatagttttaaagtattttttgttaaatcttcataacaattctctgaagttgacgttattattattaacattcccctttatgatgatgaacactgtggctcccagttattatgtggtttgcccaaggccatccagctgttaatacacacattttctttttttaattttaatttttatttttatttttgagacggagtcttgctctgtcgcccaggctggagtgcagtagcataatctcggctcattgcaagctccacctcccgagttcaagcaattctcctgcctcagcctctggagtagctgggattacaggcacgtgccaccacacccagctaatttggtatttttagtagagacgtggtttcaccatgttggccaggctggtctcaaacttctgacctcaggtgatccgcccacctcagcctcccaaagttctgggattagaggcatgagaaatygcacccagcctatctacttatcttttgaaatataagtttcactctttcctttctataatcaccaccattccctgaaatttgttttgtttgtttgtttgtactctgtcgcccatgctggagtgcaatggtgcaaacgtggcttactgcagcctcaaccttctgggctcaaacgatcctcccacctcagtctcctgagtagctgggactacatgcgtatgccaccatgcttggctaatttttgaaaaaaaaaaaaattttgtggaggtgaggttctcactatgttgcccaaggctccaaagtcttgaactcctggcctcaagcaatcctcccacctcagcctctcaaagtgctgggattacaggtgtgagtcaccatgccaggcccactccccgaggtatttttgaaaggcagaactcttgaattaagagtcaaatttcagctgtggttacatgaagtcaaaacaagtggttgcttcagtggaaggaaatatcaaccatataatttctggtcatcatgtaagctgcttcttaagagtagagtttctaattttcaactgtctacagtggcttagagagatacaatcttagtaaaaacaatactgttttaaaataggaaacaaatagaaatgtgcagtcccagacaatgaatgcttgttctggaagagccagataccaagcaagtaggatttggtttctgggcatccatttccatactgtccttcctgaggcctccagcattattgctgcagacccagcatgactgaccagtttcatcatcatcctcattctcatctttataaccaactgtcctgtttccatttgcccttcatggtacatgcagcctcttccaacttctgcttgccactctcccttgagatgcatgtgcttgctcgtgatgcttaggaagtagtgacattatttctggggatcagttggcagtagggtgtggaggcattatcaggccatcgaatgcatttacttggtgttccatttgttccttcatggatcatgatgtttgccaaagaactacttatagcatccaaagatgcttttcggtttcagttgtttgagtttaacaaggcaaatagatgcatgaagtttggccaacatagtgggcttctctgttaactttgctgtaacaaaccaggttttaaaaactggctgacctgactgttattgttggggaagttatgaatcaattcctgtcatctccaatgtacatttcatcatrtactaagtcatatcatgtattatctcattcatagtccaaagctaaccccacacaccaaatgtctgtttgaccaatgctacacattacatcattcaatttaatctggtgctttatttgtcttaaggcatttccacatacattatctcacttagtgtcrcaacagccttgccagcgaggttgggtaggtattagtattcccactttacagattaagaaatggaaatagaggaagatgtaggaggtgttaagtgcagagcagggagcttgaacacatgacatctacttaatttagaatagaaaatatggacttttgcaggtctgtatagacattaatagctgggggcatctttctctctacatacagtttgctctgtcatcctgtggggaatgtttctgtcttctactgttgctccaaatagctagctatttgccattgtcattattgctaccagctcttttctggaaataccaggaaaartattagaggtaataattattcagacagaaaacactgaggatctggagaacacagtggaacttaacagaaaggcagatacttgatggccatcaccatcctatatgatgacactggttttcttttcttttttgagatagagttttgctctgtcacccaggctggagggcagtggtgcagtctcaactcactgcaacctctgcctcccgggttcaaatgattctcttgcctcagcctcctgagtagctgggattacaggcatgcactaccatgcacaactaattttcatatttttagtagagacagggtttcgccatgttggccaggctggtctcgaactcctgccatcaagggatccactctcctcaccctcccaaagcgctgggatcacagggatgagccagtgtgcccagagacactggttttcttatatcctgagggtcttggggttattcattgccaaactaagaagcatcatttccccccattttaagaatgggaaaattagggtatgtacaagtaaaattggccttccaaggttcattcattattgaggcctatgtccacaagaaatgggacttccagcacttggtagtaaatgttagtggtcccctccctgcatacagcagcatatcaccaagttgtctggatttgaaaaaacaaggtttgatgtgtgagagaaacacagtatctgtcttaagtagaagaaaggccctacagtacacatttatttctcagaactacttagatcaccggaatcactggttctccttagcaagaaaaactccaaggaccaataaccctatccacatatttaacaccatcagaaaaactccaccaacctaatgggaagaactgtgctgcatggttcaaactatgaaatcaaacttagccttgccagaaacaggtgatcttactgaggtgctagtcctacaacagcccggtctcatctttaggaccatctttaggactgttctgaaatgtgctatgagaatctgacccatgtttctgagagcatattttcaaggtacccacacagaaacccactaaaaggagagcaggcactgagctctgtgttggaccctggttggaaagcaggagagccatgcacgcagcacagtccttgtcccatgccttacacatagcagaaactctcagctgacttttgaaaaggggcttgaacactaatatgtgaaaacctcttttagaaattgatgatgcaatgcgcaactttgctgaaaaagtgtttgcctctgaagtcaaagatgaaggaggtcgtcaggagatttccccctttgatgtggatgagatctgtcygatttctcatcatgagatgcaagcacacatattccatctggagactctgtccacctccacagaagccaggaggtaagtggtgtaaggggagtgcttagtatattggcacctaaggaggggtatctgccagggaagatatggttcaatttatccaaatgatggttcaactcagaggaagaactctgccagagttagcaattcctaagactgggcacagtggctcacaaatgtaatcccagcactctgggaggccgaggtgggtggatcacttgaggacaggaatttgagaccagcctggtcaacacggtgaaaccctgtctctactaaaaatacaaaaattagccaggcactgtggtgcatgcctgtagtcccagctacctgggaggttgaggcaggagaatcgcttgaacctgggaggtggaggttgcagtaagccaagatcaccccactgcactccagcctgcgtgacagagcgagagtctgtctcaaaaaaaaaaattccttttccccccaacactgtatatgctagagtgagtagagtgaggggccaatgatgaaaaaagaagaaagcagtgggcctcctatctcgtccatatctcccttgattgaagcctccctacccatctaagcaagaggacttcgagataccatagaattatttcagaccaaagtgggcaaatggctgctgtgaacatattcaatttacacacaatggtaatataaactgggactcaagagccttcatcttcagactctgtccctagccaaccttagtgttatgctccctgacatgaatcctgccctccagttagtctgaccacctcctggccttaggaatactgctctccaattctgccctcatgacctgcccatcccatgtctatgatgcatacttgctgcctcccccgagcagtctttgaaaatccctctccaccaagtctattttcctttatttgaaccactctaggattcactaccagccacactttagtccccaaacctcaaacctatactaactactttgctggaaccccctccttaggtcctccccccatcccaccagcttcatggggaaaagactattctgctgtctttctcttgattttacatctttaaggaaagaacagcaatccatctcctttggtgtcccccataggacttaacacaggacttgggtcaaagcaataaacttgggtcaaactcaacaaatacttgttgatttgagaaaataatattaaataccttataagttccaggtactgtgctaggcattttatatacattaaatctcatagaaatcctataaggtagtcatttttgcaccatttgttttagatgggtagatgggagctcctttatccatgtttaaggaacatgaataaaatgatacaggtagtaactgacatagcctgtgttttctgtagttcctagactgcctattctgctgggagtggactgcctgggaagaagggtgtcatggtgaaggtcttctagtaggattgctaaggccattccaaggtagaccagggagaggggcacaaggtcatgtgtcttcagtgatttctcctcccactatgcttggatcctgtttctgatacccaaccacattttaatttttactttttgtcctcagaataaaattgtatagagaaacatctatctatcacaatgaaaygcctgatgaagacaaaattaactcttacttttaaatttcgaacccagaaaaaagyrtttccaaggacggaagactgttaatttgtccattccactaagtgaaacatcttccaccaaactgtcccacattgatgaatacatttcctcatctccaacctaccagaccrtgcctgattttcagagagtgcagattactggtgactatgcctctggggtgagttggtccttgccactcagacttagcaaccaggaagccattcagcttgacagttctagctccttgccttcttctctttcctgttgagggaggtattagctcacctgtcctttgttacacttcattattgcatttcaatactaatatggtggtatgtcttatgtttctgttgtttttatcatcccacataatttatcctctatctcatttgcttgcacatggagaatatggagtagaatgcagtgtgtatgttacagaatacaatggacagattttggcaaaaaggaccaaagagagcagtagagtggtcaagtctcactgatgttgtcataaatcagaaaagggagcctctggggaggcacggagtctctggggaaaagaaggacccaagcagacctaggatagtgagaagggttgcagatagcataaaccaaccaaagaaaacagatccagagaaagagagagggaagagaaaaaagaaggmaccagagaaaagaaggaagytgagagagaggttagaaaatcctaacgaggctattgtttttttgacgacctgaactctccaatttcattacagatggttacacagtagatcattacttggaacagactctaggatgccacagggatagtaaagtcatgtcacaaacaacttgacctgcttgtctcatccagaacagttggtcaattaataaatctctgccacatggacttgcagaatcagcatcatattggtgaaactgctgtgcagccgtccgtcgatgctccaaatatagttttaatgaccagtgctgggtccccttctcatgtaactgacccacttagggtcagtcctaagatacttaaaagtgacaaggcaattaaatgcacctcattcttgtttattcattttctgtataacatgggtgctctctaaatggcagggggtttagacactaaataactaaaaggaaatgcctaatagagatgagtacaggggaaacacagtttggagaactccagaattcaaaataacataaacatttggagataaacttcatacctgcatgcttgatagaaatgaaaacaagaataaaaacaaagaagttaggaggacgaacaaaatgtacacaagtcaaggagtacttctcctcctgtgaaagctggagggcacctgaaaccttgacctggagactgggaaaaacgaagtatgtttctctaccagttggctgaatgtggctgggctgctgagcaacactctacgctctacctggttgtagtctgtacccaaattagtcttcaccctagtaatttaaacagagaggcaaagaggaaatcagggctcagttctcaagattattaattcctggtaaacactcgattcagtttaatcagtcttattgagcatctattctgtgctaggcattgtgtgctgagaacatgaaggtgaataagacccagctctcattcttgaggacctgatagackagtggcctattaggtggcaatgagctacgcatgccattggaagcagggaagcagacccccagacctagcatctgtgccagacgcttttggccaaggacagcaggtctttaaaatagttaaactaattcaggatcaatatctggaccttaaactactggggacaagcatatggtagtcccacaggaaaagtctttgggttctgataatgaacattcagtgatttcaagttataactacttgggcatgcctggcccaaccaggagttgggaatgggggcaggggaaatttccagcagstctaataaagctttcctctagaatctctcaagttttacccagaaataaaattctctttaaaatcatctaaacgactaacttctcacagaatgatgttgtgatccatygtagctgaagaaagccgtgcatgggtttgagagatttgtgaccccttattcatcccaaaatatttccctcactgaccgagtggtttgaattctcacaatttgagtcacatggtctttcagttgaggtattgtcttgtacttaaaatgttcacacgtacttagaaggaagaaagtatataccatgttggaatggattcttttaatcctatttgctagataatccctgctatgtaacaaaaaccagaaacaaacaaatacaggactacaagggaaagactagtaggacaggtaagtttggtagaaataaagaagctagaaaagcttcaggacctgctctgggagggagatccaggtcccaagtcaattaagaagcagccaggtgagtggtgagtctcagaatgggctgcgatacacaggagagctgggaggtgccaaggataagctttactcacttctcagtttttcgtgggattgactctgatatgctgacttttttttttttggcaggttacagttgaagattttgaaattgtttgcaaaggtctgtatcgggcactatgcatacgtgagaaatacatgcagaagtcgtttcakaggttccctaaaaccccttccaaatacttgcggaacattgatggtgaggcttgggtagcaaatgagagcttctatccaggtaacaattctcttacataatgtatgaaacatattttatttaaactactaaatattaaatttaaaatatgcctctagattataagtaatccagtctaaaaatatcatagtcataatcatctttggccccatttcctcacgtgtccaatcacttgattcagtctgcacaacatctctctgaactttttctcttcaccattccctaaaccctcattcaggcttatccttctccttgcccagattattgcaagagcttcgtaactactctgcaaaatttcagtctccctctcttttggttcatctttactttggtgctaatttttaaaacacagatctgagcacatccttctcctgacaagaacctttagctgctccttgctacctacaaagcaaagtccagtctttagcctggcatttgaggcccacaccctctggccccctaactacattttgtttgttttctgagacaggctctcattctgttgcccaggctggagtgcagcggcaccctctcggctcactgcaacatctgcctcctgggttcaagcgattctcctgcctcagcctcccgggtagctgggattgctggtgtgtgtcaccatgcctgtctaatttttgtatttttttgtagagatggggttttcccgtgttggccaggctggtcttgaactcctggcctcaagcgatctgcctgcctcaacttcccaaagttctggggttacaggcatgaggcaccacacccggcctgtttatttttgaacttgcacactcaacctatttctgaacttactttctctgctccatttttatactgttggttctggttggaaatatttctcgttccctacatagttcaacaccttcctgctcctggattgctgctctgcttccctgtgctcaggctgtccttcccctcacttattcaccacatgcccaagtctccagagccaacccaatctttcaagaggcagcccaaatactatcatttcttgccttctggatagatgtaaactacatgttctgactttccatagcactttatttacttatctcagtttttaccttctgccttgtagaaagttaagtacgtatttttcaacaatcagattttaataattttacagatttctattatataactggaacataattgacttaattcctatttttaggcaattaaatttctgactttttaaaacttgtttctaaaaaaggtacaataagcatctttatatacacatcttcctgtaattgtcttacaattttaggattacactcctagaactaaaatttctggggaggcaaatatttaagatttttgaggccaggcgcggtggctcacgcctataatcccagcactttgggaggccaaggcgggcggatcacgaggtcaggagatcgagaccatcttggctaacacggtgaaaccccgtctctactaaaaatacaaaaaattagccaggcgtggtggcgggcgcctgtagtcccagctactccggaggctgaggcaggagaatggcgtgaacctgggaggcggagcttgcagtgagctgagatcgcgccactgcactccagcctgggcgacagagggagactccgtctcaaaaaaaaaaaaaaagatttttgaagttccaaattgtaatattattaaagatctccagttctacaactccctgtctgtaattccttttaatattaaaatcatattaaacatgtctccagtttggtaacacataacagtggttttcccatcctctataatatagacatttagtttgtcttgtctttatttctcctaagttacgcttcaataataattatatcattaatagtgagttattaatccttaagtataaggatttcaaaattaatatttgatagtagtaacaaatattgtagtaacacgctgtttcacttctcttatgttccttatctcccaattttgaataggaaatgtgcagactgttttttttccctatgctatttttctcactttggctgctgtgggcatcacttgtaaacaggaggctttctgatgccttcctcgggcacagcagtgaagaggcataaatgaccatacttgttgaaagtcaaaaggatgaattcttaaaggctctgacggtgcgaaatgtgttcatggcttccttaggctgaaatcgctagcagtggaaagaagggaacacatccacttaatctcttctcagttcctttagcagaaattgtatgtgctttaaaaggtgggaaaaataattctcataagaattatcactcttacaataataatttattttatatctcttttttacattaaaaccactttaggtggagcacagaggattcttaggggagtgaaactattctgtatgatactataagggtggatacatgtcattatacatttgccaaaacccataggctttgagtgaaccctaatgtgcactatggactttgggtgattacaaggtgttaatgtatattcatctattataacaaatggaccctctgatgcaggatgtctagagtggagactggctgtgcctgtgtgggtaacgggctgtggggaaattgcattttctttttctttttctcttttttttttttttttgagatggagtctcactctgtcacccaggctggagtgcagtggcacaaactcactcactgcaacctccatctcctaggttcaagagactctcctacctcagcctcctgagtagctgggactacaggcgcacaccaccacactcaactaattttcgtatttttagtggagatgaggtttcaccatgttagtcaggctgattttgaacttctgacctcaaatgacccacccaccttggcctcccaaaatgctgggattacaggcgtgagtcactgtgcccagcctggaaacggcattttctactcaattattttactgggaacccaagactgatctttaaaagcttatttcaaaaaacactctaaattacgcctaataaaaaggattggcttaaataaggtaaagatctaaactctatttttttaactgtagtttgacttttattcttatgttattatctaagagctaataatatgctctaaacagaaagcctttgatgacaaacttcagtaaataatgaagattgtttgtaagtagtatatcgattactttatgtaaatagttcttccaaagaacttgaaaaatcattcttacactagacaacatattattttatttttcttttttttgagacagggtctccctctgtcgcctaggctggagtgcagtggtgctatctcagctcactgcaacgtatgcctcccggattcaaatgattctctcgcctcagcctcctgagtagctgaggtaacaggcacacgccgccacagcctggctaatttgtgtatttgtagtagagacggggtttcaccatattggtcaggctggtctcaaactcctgacctcaggtgatctgcctgccttggcctcccaaagtgctgggattacaggcacgagccactgcrcctggccaatatattatttttatagctattttatactattatgtcacctttaaaaaataatgcaaaaataaaggttagcttaattccagataattacaacttaagtaccggattccaagctaatgagatgttgtagtatttcacattttggttattwttatgtggtcgttcatcctatgtgctaatatattactctgtgtttgattgaaaaagtcttyactcctcctgtgaagaagggagaggaccccttccgaacagacaaccttcctgaaaacctgggctatcacctcaaaatgaaggacggtgtagtttacgtctatcctaatgaagcagcagtcagcaaagatgagcctaagccacttccttacccaaatctggacaccttcttagacgatatgaattttttacttgctttaattgctcaaggacctgtgtaagtgtttagtgagacctaaacaacaacaactagtactacaagacctaaacaacaactagtactacttctactgatagtgagactaagtatttactaaatgmttactatgttcaaacactgtattaagcccttcatgcacattgttccttttattgcttacacttttcactgtgaggtggttattttcataattccagttttatgagctgagactttgatgacttaagtaacttgcctaaagtgacacagctggctgagccaggattcacactcgaatctgctgaccccaaactttgaataacactctctccattgagttttaagatacctttcmaagttctccctcattcttatgtccaacattattgaaaagattaagcctttggagcccactacttytcagtgggattaactgcagagtaaactaaaaggtttgttccaayaattatttcctatgaatgataaaggtcctgatagttttgaaattgtgactgtttttcttgaatgcctgaaactttttggaattatgtgattttatttttcacagtaagacctatacccaccggcgcctgaagttcctctcctcsaagttccaggtccatcagatgcttaacgagatggacgagttaaaggagctgawaaacaacccccaccgagatttttataactgcaggaaggtaaacattttagttgctcaggggtaattcstgggcaaaaacaattcaattatttattgagaagcacaagaaaagagtgtgtttctgatkaayctaagatttctacaggttcagtggattttagtaaaaacagataatagattatgtccaatgggttagggttaagtgccatttctatcgttttccccatagaaaggtttgccacatttttggcacaaaaaattatagttatcctcaacaacgaaaatagcaacaacaacaaaacatcaaaaatgaccattctagaatttgaaagatcttccttctagtcctttttctttgaattcctgactgtaagaccttggaggaagggatgacatattttcatttcagtgtcttcatttgtcaaattgggaactacacctgcacaatccagttcacgtgaggattgtgaatatcaaatgagctagcctagagattgtgaaatccaataaactagacacacttccaagatgtattctgaccattaaaatgattacaaggaagtgggaataggaaatatatgagcagagattcaggcccaaatcctggctcagctgcctatacaactttggactaattacttaatctgctgaaatttcagtgtataaaatttagttataagaatatctacctcataaaagccatcactgtgtcatggcttcataatttcaatcctttctccttaggggctgaaagttatggtagttacttcacttccagctgtgttttaggagtgaagaatggtccagaagaatgtgtggatcagacgtaggaaataaattggatgtacagatatacagaagaagcaagcattcttattgcctctagcctaacctttcacatccttgcatgggcacgccacagttgtaatggattttttattgctggaccacctccaccaactgtcagctcacatcctcattattcactttgtcccaacgcagtgggatttgcagcaccatatcctctaaacagagtagcataactaaggctgattgatgtttttttctttctttgaatatacatacaggtggacacccatatccatgcagccgcttgcatgaaccagaaacatctgctgcgttttattaagaaatcttaccaaattgatgctgacagagtggtctatagcaccaaagagaagaatctgaccctaaaggaactttttgctaaattaaaaatgcatccttatgacctgactgttgattctctggatgttcatgctgtaggttgaaacggcaatgtcagtttcactctaatactcagaaccccacatgtctttctcctacaagycctcccttctcagaggtctcttaaccatcttggcttaccacgctgcctgaaagcaccacagacaattttgaagtttgctcattgtcacctgtcccaaattccattcttggagcccaatgccctccmccactaccagaccccagttctgcttgactatttcctagctctctctgtccagacagctctggtaataatacatctctgctcttttttcctgattcagggacgccagaccttccagcgttttgataagttcaatgacaaatataatcctgtaggagcaagtgagctaygggacctctacttgaagacagacaattacattaatggggaatattttgccactatcatcaaggtgaggcggaaccaatcacatctatggtatctggcatggttcttgaggaaagggaagaaggaaggaaggaaggaaggaaggaaggaaggaaggaaggaaggaaggaaggagggagagagggaaagaaggaaggaagggagggagggagggagcgatccctggggccaaacactacacaaatgaatataaggatttcctctgacacatccactctaatgatttttgaagacctctattgctaaggtagagaaattaagggtgtggttttgagattgattaaggacctagccttttcagattctgaaaggaagagttagaaagggaatctcctctccctagaaccccagaggaacttgtgggaatccctggcttggacttctctcttggctttgcaggaggtaggtgcggacctggtggaggccaagtaccagcatgctgagccccrcctgtccatctatggccgcagtcctgatgagtggagcaaactctcctcctggttcgtctgcaatcgcatccactgccccaacatgacatggatgatccaggttcccaggatctagtatgtacctgcccatcagaaactctagagcctgcccttgtctcatctgcttcaagtcccctgtatgaacaaggaacgtgttgcccatctagaaataaatcagctttgttaaaacagcattcactatcgggtcctgcatgcttggttttgtccactctgggtacagcactcttaaccacagacaggagttaagaagatcatttcggatcagtcctctagctttatgaagatcataaataactcactgagaatgattaaaactaagatagaataagaactatgtacagtttggtatacattttctttcacctggtcttctctgtgtcaagtccattccttcccatgctcatctctactgggatgtggctttcttgtatcagaacctttactactgtctgtcaattgtcccacctacaagtgctcaagttctccacaatcaatgagtatttatcaatggtattgctgaggacatcatctccctttcataccacctgctatcattcatcgccttcagggatggcttctctttcagtttgttcagtatcattgatcttttatctaacttgggtgtttatatgttttctggctacctgtctttgtgttctgtgtgacctactgcaatgcaagagtttcatcctgtctctttaaccaaaamaagtaattttttgactgggataatacttcctaataggcagagaggcagtaggttggttaggagtatagattctggacccagagtggtgatacttgaatcctggcaatacttaaatcaaggtaacacaaccatttagctgtgttaccttggrttaagttatatcaccccattgtgccttagtttcatcatctctaaaacaaggttaaaaacaatacctaacttattgagttgttwtgaggattacattagctaatatttctggtcacttagaagagtgcttggaatatattaaatgctatatcagagtttgttaaattgcagatcagaggtattcttggtaatcatttcctgttcactgtcttgtagttacacacatatattgaagcttttatgacgtaattgcatattcctctatgaggacttagctgtgaaggtttagttttcttatgacaaaggtttgtaaaaaagatggggacatagggtccaccaaaaaatttttatttcctatgtgctgcccaaactgaatccctctctataggggaccaaaaagaatgtatgaggagcatggacctaggatagatataccacgtcttttcctgtgcatgacattcgattctctggttccctcatactggggctatcagtcctaaaaatctttttttctcctaaattctcttcattcttgcctctagtgatgtgttccgttccaagaatttccttccacattttggaaaaatgctggagaatattttcatgccagtgtttgaggccaccatcaacccccaggctgacccagaactcagtgtcttcctcaagcatgtaagcatgacccttcaggccttcatactgctgctcatgaaccagccttcctacctggtcatgactaattcttggtgcttatctntttatgtttggtctgtgcctttggacctgaaagtttgtgtgaggactgggaccctgaagttggactgaacccattgcatggctcacttttcctaacagatcactggctttgacagtgtggatgatgagtccaaacacagtggccacatgttctcctccaagagtcccaagccccaggagtggacattggaaaagaatccatcttacacttactatgcctactacatgtatgcaaacatcatggtgctcaacagcctgagaaagtaagtaggagacagctggagctaggagggtctatttgacacagctctttccacatatattggcaattaaggtggtcaggggcctcatgcattactgtgatggttccaattggcccaaatcagaaatttctttctcttaacttttttcttcagtttatttattttggggcagaaatcggtatttcgatgctttcaataactttcacagttcctttttttttgggaagtttaggaatttatactaatcattgtgcaattaatgataaaacttcatatattttgcccttcttgatatatttgggtaaggaataagtagaggaatattatactggagttttctggaaacatttctcccttaaaatttgaatagaatagaataaatgatgagatgttgatattggtaaatttcctattgagactgaacgtatttccatccaggcaatcaacactttatttgcttccttacccccatatcctctgctgcctctttttggaaactttgtatttagcaagaattaagattatgatttgggactgttttgctgaatcctttggatggcttacttccttccagagtgttcacttttctactgaattttcttgtgaatcactccatacccagaacctgcgattccaatagcagttctatttccccagggaacgaggcatgaatacgtttctgttccgacctcactgtggagaagctggagccctcacccatctcatgacagcattcatgatagcagatgatatctctcatggcctaaatttaaaaaaggtgagttggaagctctcttcttaacttttacattggagctagaggaatcttttttcccttaaccaaccatactgtcacaagtcattatcgacactgcaatcataatcaagtagagcataaaagattttttagtttagtgcagttcattctacagaaagaagtaaagggacttgctcaagattaccttgctagttgctgtcagataaaagttaacgcagatctcctgacttctagcttagaatcctgacaagggataattcagagatggcctggctttccttaagctagtttttgccagatttcttgttatagcatgcttcaagatgtttttttgtgagagtcagaactttcttgtagagagagagagaaaaaataatgtttcaaggcaaagtcttttgcctgagacagaccatctaacgtaggccattatagatcaaataaacaatctggtttgactcaatgtttctgaaaattaatgtatcctaagtacatttattctaaatagcatttacattgaaaaactcctaaattctccttactaagagacttgaagaacaagtgataattttgttgaaagctgaagcttaaggcagaccatgagattgtagtgtttctagtttgtattcctttttcaacatctttaaatatttttttacttttctttttcagagtcccgtgctacagtacttgtttttcttagcccaaattcccatygccatgtcaccactaagtaacaatagcctatttctagagtatgccaaaaatccttttttggatttycttcagaaagggctaatgatctcactgtctacagaygacccaatgcaattccactttaccaaggtatagtatggacttgggcaatacaagcatattttgctggactgttgtttcccgtccagaatttgaaagtcaaataaaggtatttcattattttttcaggcaggatgcatattatttattaattcactcctcttttwtcctcatttaatataactgcaggagcccctaatggaagaatatgctattgctgcacaagtcttcaagctgagcacctgtgatatgtgcgaagtggcaaggaacagtgtcttgcagtgtggaatttctcatgaggtagacctgtcttcaaatggcttcccttctgagtatagggtctgctaacttgaataccgaaaaagtagttgggaaacacatgtagaaaaattgttccacgaatcatatgcagttactatggacagggactagaagggattattctatctctttgcctgtgccttttgggccagggaagtaaaatacacttgatttctcagcagactgtgaacactgaggcactagatgggtgcttttaatggtctattattattattcttttgtcagtggctaacataaggaaggaatttttgtaaagaatgcaattattgtctataccagggtgaaaagagacaacaatcattctgccatccttttctcttataggagaaagtaaagtttctgggcgacaattaccttgaggaaggccctgctggaaatgatatccggaggacaaatgtagcccaaatccgcatggcctatcgctatgaaacctggtgttatgaactcaatttaattgctgagggtcttaaatcaacagaataaaaaaaagtaaaccaaataataatatgagtgagaatttcattgtagagtttgaataataatagttacctgttattgagtccctactataaaccaaggaaagtattagatgttccactgaaattatttcatttaatccttctcacaacctttataaagtagatattattatctccattttgggggaaattagtacactaaagctaataaggttaataacctgcacaaggatatacctggtgaagggtagcagtgggaacgtgggtttctctgactgcagtctctatgactttcaggcaaaatatctattaaagctgggcaaaaatacaagcaaatgactttttgggagataggcttctggtttatagcatgaaatttgcttaaggcacttagaaccactaaaaagttctttgacaaggtataagtgaatagtggcttttttagacaaaaccagagggcgtacctcaatatagaaaatcagtatttatgagttattatattgagggagaatttatcttacaaaaggattcttagctttaaggatgtaattgacaataagattatagtgagctaaactggtacattttaaatgattttgcttaccaaagtaaaatgtacatataacttttaagaagcatgcctattacttaaggtcaggtgaaattccaaatgggcagatgatacttccacacatacaactgtgttggcatctagtggctgggctgacatttcattcaacttattcaataaacaattattgatcaaatagctaaattatcaggtactattctaaacaccaaaggtatacagaataagatttcattcctatcctctagttgtcctcagcatgaagttatagtgtggctacaagtaaaaaatagaattttgtgaaatgtcttcaaaagtaatgaacttttttcttttttttgagacagggtcttgctctgtcacccaggctggagtgcagtgcagtggtgtaatcacagttcaccgcggcctcggcctcccaggctcaggtgatcctcttacctcagacttccgagtagccaggactacaggcacatgccaccacacccagctacttttttgaaccttttgtagagacgcggtttcaccatgtcaccccagctggtctcaaactcctatgctcaagcgatccatgtgccttggcctcccaaagtactgggattacaggcgtgagccactgtgcccagcctgaactttcaaatggaaaaaaaattgaaagcaaatttctgcacgtttctatattctacacatgcagccataagcataggtgtaaccctgatggcatgtttgtactagctctggtgtaagaatctcttcctgatttctgaagttgaagttttgtttgttgagtatttgtgaaccctttaaagaaccagattttattttaccttggcctcctcatcatcaaaatagtacaaattgctacattaaacactgtattctcagacttcaaagggcattaactaccattatgtatatctccatcttacccatgagagggcagtagaatacawacatgtgaattcatttattaatctataaatttggtttcatacgtgatacttggaattcaacctgccttattttgccaaataatcttcctgaatgcaggggtcaaaaaatacatttctgggctgggtgcagtggctcatgtctgtaatcccagcactttgggaggctgaggcaggaggactgcttgagctcgggagttggagaccagcctgggcaacatagcgagaccctgtctctacaaaaaaataaaaataaaaatattagccgggggtggtggtgcatgcttataatactagctgcttgggaggccgaggtgggacgattctttgagcctaggaagttgagacttcaagtgagctatgattgggccaccgcactccagtgtgagtgacacaaagagaccctgtctcaataaataaatagatagacacattatataagaatttttttttttttggtgggggaagcccataatgatcagtgtgcaaaatttactacaaacaatatccacatttatttcctcattgggacatgattttttttaagtatgtcattacttttttttcccccatcatagaatgtaatttctgttttactgtctacaggtgatagtttcacaacggtttgggatatgctacctttattgtttgggttaagtttgcttgtgacagtcatccgtgatacgtaactaaacacctctctttctggtagtcttctattttggtacctctgtgtgaacaaatgtaggaagagtttggtcaccagacccaagaggctctggctgggtggggtggggtggggtggggcggggcgaggcggggtggggtggttagcgagtgcctgggaaacaggctcaactgatccttgtcccgcagcctcggtgaaactgggttacagcttgcagtaggcacaacaccacgcacatacctaagcaagagcgtgttgcaggcggagcgcttaggcatgtgtgtctcaacagggcgtgggggctgacctcacgcactgggagtatcaaggcacccccgttctgagattccaagcctgaggtgccgcgagagttatttgcttctcttgacgtttcaagttggcaccgtagtgcaattgtttgctcactgaggtcagcctaggaaacagtgcttggattccctgattaagccaggctttatcttgttgagtagttgtgaagagtaaaccttcacatgaagcatagggccgtctccgtggggccgatgcgacggcaggcgaaggcgatggagctctggctcgagggcttggccggacgacggtgacactggtcgcccgcctgctggaactgcagtgaccgaggtcctggcaaggttctggccatacagcggacttgaggcgtggtggttcccctcaccgccggccggggcggtgtcggaggcgggcatagcgtgaggggtgggaataggagccaataagaactgagccttgccagggagggcggggctagggggtggggctgcagccgggacggggccttcggcagggcctgcgggggcgggacggagcggacccgagtgatacccgggagactagcttggccacaggagacaacgttgaggtacagacaggtaagagtcggggtgattcggcgcggggtttyaagccgcaggggcttcggactctcggggctgtcggcatcacccttctgggcgtcgggtgcggggctgtggcgccgcggcgtagtcctcggacggtgcgagccgagctggcggaggtggtgtctccgcgccccgctgtctcggcacctcctccgtccggaggagcaaccggttgttgggcccagctttgggacgtcctctcgtggccgcacgggttgtggcggagcctggctgaagacctcctcgctacctcaggggcttggggacccctaggctgggcgccgctctctgctggggaagagggagggagcgcccggcagcctggggaaacgcgggctttctccaaaattagccagtgagcttgaacttcgacatgctgggacgatgcacttccaaacaatattttgctttttttggtgttttgattcttaacagcatctaatacgcacaataccgaaagttgtcaagtagaattttaatttaaaagtctgacagtggaacacctaagagcttttgagtaactagagctgtatagcagctgatgattagattatgagtcaaaaggctcaagtctagggccagaacccgcggaaccagatgtgatacctcggccaaattaacttcctgggcctctctttccgtaactgtgaaactggcaagttcatgcctatgggtattctcagggtcaaatcagatgagtgacagtattctacaaatgtcagatatttgaacgtgcgtgtggagcgtgtatattctgtgaagcaactactacttgcctggtacatagtaggcactttacaaacgtttaccctaaagctagtgattcttctgcagtgttttagataaagtgatagatccttgcttactgtgtaaataagttgtttaaacttttcccacaaagtgacccccattgtttgagtgtgtcctatttttaaatgattgatgaaattttctagaatagcacagtggtgttatctatacactgttgctgaatcatttaccgcgaagtctgtagcaatcaaataatctacttctttgtcttagctaaatagttgtagtttaagatacctgctaaagtaagctgggaatattgttccaaatcaagactttaatttgtttttgtgaattgacgggctgcttataggaagatttaaatcttccaaaatattgttaatatatagccatattttttcatacagcctttattatagacgtttttgttctttactatggatatgtgtgcgagggattttagcggggagatgggaaataaaaaagaaaatggcagttttgtaacctgtaggcttttgctggggatacttgtaggcctgttctgagtttgccaggcagaaaccaggaaatgtagtaattatgtgtcttggtctttcattagttggggtgtgtgtgtgtgtgtgtgtgtgtgtgtgtgtgtgttgaatgtggcagtacgttttttaaatgcagcaataaaggaagaatatttatttttcttaatgacaataagcagttttctaaagctggaaattatattacttttaaatggtctgtagtgagtcttaagttataggcaagaattttagaccactggataccaagatcaaattaaatgaagtagtagagggaaagttactagtgaatgtaatttttgtgtgtgttgctttagaagttttacttaaacatgtttcagcaattcagtggaggatgggtcttttgaagctactttaaaacatgagttttaaacgtactccatgtataaatttttctgtgatttacaatttcttgatcttggaggtctgaaaccttacattcacattgttttttgagggcctactacacaataggcacaagattatatttatgtaagagcagtatgtaattcctgtcatctaggagattccattctaccaagtgggctaaaataagtactgaaaaaacaaaagctgtttttaaagcggatggtaacaataacaacatcagctatcattcattggtacctattctgtgccaggcagtattctaaattctttacatgtattagcttacttaatcctcacaacagcaccatgagggatgttattatgattatctcattaagaggcatagagaggttgagtaacttgcccatgattagacaacctagatagcaaaagtaggattcaaatcagtcattctccaaggacctgattgtaacctttgcgctatactgagtttcaaattctgtgagtgagatacaaatgacatctaataggtattttaaaaagaggtctataaaaaactatttcaaaaagaaggaaagaaagaggaaaaaataaactggtattgcaataccagttttattgcaattaaaacgatgtaattatagtttatctgtgggaaccctttttttgttattgttgccagtgaatgacatggggttgattctaagctctcagtccctcagtaacaacagttatggcattatcttaacaatatgaggtgcttatttttcattaaaaagcacctcataacttctttcattaagaagttaaaaatatctgttctcagactgtaaattaagtattagattcaagaagagaaaatgcttccctgtctttaagaagcttataacccaacatgtaaataagtctctacaatttcagcatgataagagctgtaaagaagtatagatttaggtacgtttgaagagttgcaagaaaaagaaagaagtatagatagaatttaaccactgatgaggaaaaatcattctgcgtgtggtagggaggacgattagagagaagatattaaatttggctttgaaggatgaataggagtttgctgaaattgggtcaggaaacaggagatatgaatgaaaac

SEQ ID NO: 8811 - DNA, 140197 bp, Homo sapiens
tggtggctcatgcctgtaatcccagcactttgggaggctgaggcgggcggatcacttgaggtcaagagttcgagaccaccctgaccaacatggtgaaaccctgtctctactaaaaatacaaaaattagctggacgtggtggtgggcacctgtaatcccagctactctggaggctgagacatgagaattgcttgaatctaggaggtggaggttgcagtaagccgagatcacaccattgcactccagcctgggcaacaagagcgaaactccatctcaaaaaaacaaaaacaaacaaacaaaaatatatgtatgtatatatatatttatatttagtagagacaaggtctcactgtgttgcccaggctggtgaacacctgacctcaagcagttctcctgcttcggcctcccaaagttttgggattacaggcctgagccatggtgcctcgaccctattgtctgttttacagtgaccatgtattacatttgaaatttgaaaaaatagagatttttttttcaaaattaattaaggaaatcagggcagagggaagaaaaagtaaggtaaaagcagcgataaagtaagtatcctaagtatattccattgctcttgtatttaaatcaagtgaagttcgaagtatggcgcctggaacagactcaataaatagcagtgagtgctggacttcatgggtctctgtccttcacagaaactcaactgcccagttgaatcagagtaattggtggcccaaggagacacgagaggggggtcaggggggatagcctgatctccagtctttcaccaggggcccagggcagggggaagggtcctggctacctcactgcagggttggatgagtcaggaagagcctcattgggcctgacaagctctgcctgcctgtaccctgcctgcaccctgcatctgagcacggagtcccctcccctgccagcctcttcagagcttcttctgccattttcatgactgtatcttcttagacaggctggttactgttccttggagagtctggtgatttcctcgggtgccctagacagtatttcagctcagttacggaagacaaaacaacattaaaaattaaaaagctcttacagcgagtctcattctgtctgcatgcctgtgggtcgctcagtgtgtccagcctctgtctgacttggcacgtggtattactctcaaagcaaaaaatcagccaaacaaaagggattctctgggcacctactgtgtactagtcattaccaaacacctattctgtacaagacgatgacagaggcaaagcggaggaagaataatgccagtgatagccatggccacatatattgaacgtctgtgactcatgtctctccacacattctgggagattccttttggatcctggtgagtcctgaggctgcatggctggaaacccacacctaaactacaatgccaggtatctccagggtctcacttcctggctaatcagaacccttggccacagtgattggcagaggaattgacacatgtctcagtgacagtcgacaagactcagttttgggaatgttattagaactgtaggaaaaagtgagtccctgtttccgctgggagttgataagagagtaggatgtgagccactgctgagggcagccatcttgtcatcatgaggccaagaggtgaggccagcagggagggaagcggtcttcagagatggagtaaatgagactgaatcctaatgtcatcatctgagctcctcttggagccatgcctaaagctagctctgcccctgtactttgtagttacacaggctctgtgtaactcaaytggctctggccaattcaggttggttttctgcgtttgagccctgatgctccgatggggcagaccctgtgcccagaggcttgagtatttggaaggggcaactccccacatctcatccagtctccagcagtctaacaggggacaccttctcctgtcatgaaaccacttgtgtctgtcagagggcatggcgagcccatgaataccaacagaagcagctgcatgccagcaaaggagcaaagcccctcaaactagctgtgtcttctcgggcaaatcactttccctctctgaacattgattttctcacctgcaatatggaggtgatgtgggaatcctagcacctaccacatagaattgtgagaatcactcagataatgctgcaaagcacctgccaccatgtctggcacataataaatgcttagcatttgttatggctggccgttcccagaaagctgtttggatgaggtgatctctgaagatcctggaggagttggaggtaagggtcagagtcggcagcaaacctcacttgcttgcttccgtttgagcagcataagaccaggggctgcgttttctggagcagcctggtagaatggaaaagactcagccatcaccttgggaggccttggttctagtcctgattctgctgtcaagccgggtgagtggctttggagtgggtttgggcatgctgcccctcactccctgcccgccccgccccatccttaatgtgcccctttcagaagcaagaaagccacagcctttctcctctgctttcttcatagagccaggagaaccacaccttactcaatatagtgtccccagtactctgccctgagctgatacagcattccagaatgtccattttatgagtgattaaaatgtggtcataatacctatacctgaccttctgatttttttttttttttttttttttttttttttttgccggattctcactgtcgcccaggctggagtgcagtggctcgatctcagctcactgcaacctctgcctcccacgttcaagtgattctcctgcctcagcctccggagtagctgggattataggcacccgccaccctgcccagctaatttttgtattttagtagagatggagttttgccatgttggccaggctggtctcaaactcctgatctcaagtgatccaccactgagccctgcctttttttttttttttttttttttgaaatggagtctctctgtcacctaggctggagggcagcggcgtgattcagctcactgcaacctccgcctcctcggtccaagcgattctcctgtctcagcctcctgagtagctggaattacaggtgcccacgaccatgcccgggtaatttatttgtatttttagtagagacgagttttgtcatgttggccacactggtcttgaactcctgacctcaggtgatccgcctgccttggcctctcaaagtgctgggattacaggtatgagccactgcacctggcccttttttcttttggaaacttcttgttagagagtaacagagacagaaaagcacatagatcctaaggagactgctcaatttttcacaactgaactactccctcctccgtacctaacccttactagcacccagaagcttccctggtgcccctttccagtcattccctccccaaagataacacaaacctaacttctgacagcacaggtctaattttgcttattttttgaactttttgtaaatggagcaatgcttaaaggctttctagcggtttgttaagttacaaaaggcccacgaggtatattaactccttaaatctttacaacagtacagtgaggtgggtaagaattatgaaccccattttacagaggcaaaaacgggagctcagagagaagagaacataatcacattgctggcaagtggagtgccaggataactgggtttcatttttgtgtgtccctggatcttcaatgtctctgcaggcatcaggctatgattcttaggaagacacttgaggaatagtcaggaatcggacaccaggccagggcagctgatagtttaagtaccccatgatggaggggggctctggaccttcaggtctggtcaccttgcagacacggccagaccctccccccttcaccatgctcccaactgctgcactcaaggagcttttcgacctccctgagtcctccacactgaagaatttggaatgctgctggaaggaaggagcaacatagagttatttccacagagcccctccccgccctccaggttcccaaacaaactgcccaggaamagatggtccgctttagaatgactctgtgtgcccagacgcatccagggccactctgggtcagcacctgggcaagggttgcagtcagttgctcctcctcttccttgctggcagtaggttctgtttccaaattcaccctggtcacccaccactacagcctcctcacccccgttggctgataggcaggattccccggatctttccctctggcctcacgagcattctgtctggcctaatgaactcttagacatccttcaaagcccaaatcccaatgccgccaggatgtctttctcctgaacatacactcattatgccccctacacagtagtttctctttctcagcccaacccaaatatagatgatcacaaaagtcacacaacagtcacacacaaagaccacagtgtcaccacacacacaatgtttttatctcgatgtctcttgcaaactgggttacacacaaagttgtascaaatcacagccatgtccctcttttgtgtgggcacgtacaacacacgcaaactacaccacaaaaacccaggattttttcacaacttgtttacaacagggacaccacatttctttctaccacattaacatgcatgtacaacaggacccaaaagtggagatcacacatcacacacacacacaggcaggctgtcttctgttccttcctccttcccttgacctcacaaaacctacacgtggagacagtgtctctcctggacctgcaaattcacacgcctagagagccacggctccttctctctgctttgctaccattccctccctcacccctctatcacggggacacacacacacacagcaacaaaccccaaatacagcggacacacacacacagcaacgaaccccaaatatagcagacacacaaacacacagcaatgaaccctaaatatagcggagacacacacacagcaacaaacctcaaatatagcagacacacacacacagcaatgaaccccaaatatagtggacacacacagaacaaaccccaaatatagtagacactcacagcaacgaaccccaaatatagcgacacacagacacacggcaacaaacctcaaatatagcggacacaggttgtcctgaagtccctggacggcaacgaatcccaaataaatcagtcagggctttccttcacatataaacacacgggcacgcggaatccacccctcccccactttctgtctcctcatctctcttcctctcttacacacacacacacacacacacacacacacacacacacacggcaacaaaccccaaatataccggacacacacacacagcaacaaacctcaaatacagcggacacacacacagcaacgaaccccaaatatagcaaacacacacacgcacatatacacacagagcaacaaatcccaaatatagtcaggactttccttcacacataagcacacgggcacgcggaatccacccctcccaccgtttctgtctcctcttctcctccctcttacacacacgcgcgcgcgcgcgcgcgcgcgcacacacacacacacacacacacacacacacacacaagcagctgcagcgccccgggtcacactccagtgcaggagccaggcaggagacaaaggtcgccgaggctcccggcggccccaccggacacaatcgagcctcttcccggttctgctagctcccaacgccggtctcggcaaggtctggaccctgcgccccgaagcaacaactcccgcctgctcctgccctccaggttccccgcgcagcccgggcagccgactcccagcgcgccaagggttaagggcccgcgcgggcgcggggagtgcagcctcaggccgtgattggctgcgccacccaggcccccgcgccctgccattggccccgcggcggccccgcccctccggcactcggcgccgaagccgcgagctcgcccgctggagctgagcgcgccgcctgggccaggcagccgagccgtccgagcagctgggctgggagcmgggaacccggagctgsgaatcgggagccgggcgcggggagctgcgcgaagccggggcggagcacgcgagctatggtgagtgctgcgcgcggaggtctggtccggtccagcccagcctcgacggtcgcgggcagcggtgccgcgggtggcacccggggccgccctggctcgcggggggctgggcgccggctgcagcagcagcccccgcccggctctcggaaggcgtggagtcggggagcgcccgggcagagcgcggctctcccggcggcgctgcgcttggtcccgtcgggggcggccgcgccgagcttggttctggtcccagccggatgtggggggctcggggtccccggttcgctttggggacggttgctgcggtctgttttgggttgttctgaagtccctggactcagcttggcttggagacccagggcagccgggctgggtcgggctcgcgggtggcggcgatttcgaggtgcctggatgcagctggacctgagcgtcccgggacactgaggtcggtctggggctcgccttggggcactgtgggtggccacgcccggcgcattcggagggctaggttgcggccctctgggactgctgatccagctgtggcctaaggggtgtatgtggtggcgacgcagctaggtcggtgctgtcagagaccaggggacactcaggggccctgcacccagcgatccggtctccccagcatctcccggtgatgggtcctcagaggaggggcttgctgaggccgagtgcygactgcgataggcaggagtaccagggagaaagggaactggggaggggcgtttcatggggctctctaaagccccagaagagaaatccatttgatccaggctgggcttcctgggggggggctgttgggaggggcattgtccctggaccccaagagcaaaggccctttgtccacttgtccagggccgggtgccggcctctccatcacgggaagggagccatctacttctctttggtttctttccctatagacgagccactcggattccctctcctagttctgttctgtgccctgtgaagtgggtcaaagtcaccatgtagggctgaggagggcatgtgcctgggatggtggctgccagtacctgtgatccagcccctccacttctctgtgatgatgctgccaagcccgagggcgcctggatgggagcaggatgggaccccctgtaaagccgaagagtcccacagtggttcccagcccctgctgtgcccagagctggagtccccttacaacccgcccccccatctctccyttccaaggcctcttctcacccagctagggtcttctttgcttaggcaccgccagttgcctcactagagtcagaagtggtggaattatggcttagttctatacctgaaggtgcttagagaccacgtgagactcaacctacctcctccattaggaatctcccctgtaatgccccacccagaccgtttccgacacagggagtgcactatctgtggaccagcactggatttaaagtctcagtgtatgggcaccaaaaggccgtgagactttgaggttgtatgatcccctctgcctctaagcccaccctgagttactcataaagaaaattttttcttccttaaaaaccaccaaaaaaagaaagaggtcccctcactttgccttggtgacactttatagatccttacaactgaagaagcccaccagcctattgtgaagagtccaggctttgacgtcacaccaatttgtgtttgaaccccatcccctccacttccccacagggactttggtctaggtgaagcatcacccttgagtttcagtttcctcatctgcaagatgagatgataacacttacctccaaagggtgagataacccaagtgagagtsctttgcttcagtactgcttagttttcttttccaagcttgagcccacgctgggaagttctacctaacatctaacctatttgccccaggggttgtctctggaatccaaaacaaaagtctgtcatccatctgtccagggctatgggctggcttttccagcacagggacagaggccacctatttgctggtctggaagacgaatgaaagtttatcatgttgtagggaggaraccgtgatactttcgtctgtcatttagccagracgtgttgaayacttactctaagccaaaccccatgtragggaggaaagaattgactgaataaacagtgttatgggagcttccaccaggccataaacgtctgcactggtcctcagactttttggcacgtccttggagaggtagaaatatgccaggcaggggctctctccaagctggagagacgagagaaagcttcatggagcaggtgacatctgaactggaaggggtgtcccgggagggggacctgtgtgacagaggagcagaggtgtgagtgcacaggacaggctcctggaaaggccagaatggggctggtctggcacytggctatgaaagggtcaggaaacaaaagagaaagagggcaaaaaggttgctggggccagaaagtactaggctgaggaagtccacggtggattgttgaccggcggtgcatgcatggggtggcrgctgatgtcaggcctccctggctcctgtcattttaatttcctctaaacattggttcctgtgctgtcattcctgaggcaggggtgattcgggactgatcaagtgtttattccctggatctcctgctccgcggcttttaaacaaatccagcactcacttctttgcagtgtggccaagttgtccttggcccctgggttcctaatgcggcgcgtttgcagggcgtgtgtgtgtgtgtgtgtgtgtgtgtgtgtgtgtgtgtgtatctgtgtgtgtctgtgtgtctgtgtgatgtgtttcctgttgtcctcactgaatctccctgatggtcaccagctccccacccacgtctctaaccccttggcagggagtcagtgctgttcttaagggcctcggatggaccgtctccccctgttttctcccagtgcaagccgtgggccgagggttctgaggaggctttttatrtctcctgcctccggttgtactcaaaccaccctgcagcaggcacagagaggtgaaggaggttgcccagggtcacagagcaagatagtaccagaacaggcacaaacctcctggacttttggaggggtaacctggcagacagttgggggaaggagacccaacccatcatcccccatcygcagctgtggcaccttgagaatgttccttcacwttccaagctggggctgagttgaggctaccgctgagggttgggaatgctctttactatacagcagttgagttgagaacagggcccagggttttggtttgaatcctgatgtactaccagcttgctgtgtgaccttgggtcagccattccccggctctgtgccccctttcctacaaagtggggcagatttgctccacttctccagatattgtgagggtacaatgtatgtagaaacactgtgggaactattaagaatgtgagggagtccgggggcagtggctcacgcttgtagtcccagcattttgcgggggcgaggcgagaggatcacttgaggccgggagttcaagatcagccagggcaacatagtgagaccctatcttaaaaaaaaaaaaggtagggagaagcgttactgtttgaagataggagactaaccacatgcccccacgtcactctggtgcctctcagccactccagatggggctcccagagcacagtgcgtacttcaccctgggcagcctgtgcccctgctggtgactgggctactgaggcctccttacattgctacactcttttggtaaacaaggatgttgttaccttttgttaaagaataaatacattgttttccctgcagagttggggaggccaggggaagaacaggatttgaggcatgagagggctacaaggtgggcttggcagaatgttctgggcgttagcccagaaaaccagcttggccaagtccacactttcatgtctacggtgagagaggaaccatgagcaaatgtttacaattttttgtgcttctgctcaatttttttctctccaattgactgggkaagcctcctgccatagtcaaagggcttcattcatttgttcattcactcactcaccaaacaagtctgtctggcacaacacgaggcatgggggccgtggtcagtgtgagtgagactgataggtctctctctcccacagtctgatggacaggcaggcagacagatacagagcaggaaattacaagcgcaattactgttgtcagggagacacgcggggggctgtgggattggaccgggaacctgacctgaggatcagaaaaggctccctgagcacatggcattaaaatcataacctaaagagcgagtgggactgggaagagtgttggggggcggggggtggagggagcagaatgtgcaagagtacagaccgctgtgccttcagggatggttcatctggaggcacggaggactgtgcttaggaggtggccccggagggtgcactcagggatggtcatatgaaggacctggggctcaatccttagggcagtggggagccactcaggagtttattttttaaatttaattaatttacttatttattgagacatagtcttgctctgtcacccaggctgagtgcagtggtgcaatctcagctcactgcagcctcagcctccctggttcaagtgattctcctcagtctcccgagtagctgggattacaggcgtgccaccatgcgactaacttctgtatttttttagtagacaccgggtttcgccatgttgcccaggctggtcttggactgctgacctcaagtgatccacccgcctcagcctcccacagtgctgggattacaggtgtgagccaccgcacccagcctactgaggagtttagagtcaggggagtgacacggtcggatttgcattctgagatggtcacaggctgctttgtggtgattgagtagaargagtgaggccgaaggctgggaaaccagtgaggaggcacctgaagtggccctgggagaaaggtggtgctgcaggcaccatccagtcctcctctagcccaaaccacgcccctggcatgctgcccagagcagtcagtgaagacagaaggaggctgtggccccagacagaggtcccagacagccccttctcctgaatgtattgacccttcccctcatcctttcaggcagataaccagccgagggccctggtctccagagcctttaatagaggagaaagaacaagttcccagatcgctctgaaataaggtagaaaatgctatgtgccaacctggggatgcagctccagagtcatcctgcccataggtgtgtatcagggaagccttcccagaagaggtgttaacacttggtggaatgcttcctagacgccaagttttggacacataaaaaattaggaggggggttcacttgtccttgaagagttaatagtctgaggggcacagtttaatgaacaaccagtgctggcggaaccccactgtcagggtggcactggagtccaggacctggggcctgccctttccttgggcccctgagggcagagtggctgggatgccccaggcctgtcttggtgggctgacaagcctaggaatgkctccctcctcccaacagggcccctttggacttcctggggggaggtgtaaacaggggagcaagtttctagagagcattcaggaaatcggctaggtggggatctaacatcagggaggtgggcctggcttctgggccttctaaagacgctagagcgcttgtatgaaaaggggattaggaaccaccaacttcgaggcccctgtttgacaagtgggaagactgagagacaaaatgagcatctactatgtgcctggcacttaaatgtaatctctgctcttcacaccaaccccagggaggagggtgagccttatttcagagttgtaaaagctgaggctcaaaggtcacttagggaattagggacgggagctagacagtggctccccgattcctctagattattatggcttcagtcccaagctgccactcagtttggcagaaacttggccttcctgggaaagcccactgggacagggataggactgttgagccggtagccagaggcgttgagagctcactggggctggacactggccaggctcaaatgctggttatttattgttcacctttgcaccgcacttgacagttagaccttttcttccccattcaccgactgttcttggattcccactgccaatcagtagcagaactagaacttgaactcaggccttgtgactcccagcccagtcccccgccctgagatccccagctccccagctcagataacagcccctccctgtctggcaccacctggtcccctggcctgggtctccactaacccccacccctaacacctgatgtcccagcctttctgaccacatagccctctaagcaggaggagcagcccctggcccagaagcctcctctccccatcctcctcccacaagctcccttccctccttggctgggaaggcaggagggtgggcctggggcagcagccaggcagagttaggttacagcgtaaacacagtcatgtcaatatttacctctgcctggaagcagagcctcccacctccctgcctgactccctccagctgcccatccagctgcacatggcccgctcccaggctctgatctggtcattgaaagcaaggccagggtggcttccagcccaggctctgccactaatccttgtcctcctgaaccacggtcttccttcgtgggcctcagtcttcccatctgtgaaatgacatggctggagcagactgactccagggccgtcttcagtaatgacatgcaggatgacaagtataatactctcattcagaggatagactcgaagttgtgcaaatctgggtttgaattccagccccaccacttcctcactgtgagacttggggcaaggcacctaacccctttgagctccactttcttcctctgtaaaatgagagcctagcagtacccattttgtttgctggtgaggawtcatgagctatgtttgtagcacttggcacaggataaggtttgattaaatggtcatggtggtggttgtgattccagrtaaacattttgcgattctctgaatccagacacttggttgcgtcacttggaaactggagccaagggtggggactctaacctcatgtcctcctggtcctctgagaggccacaggctgggctggggtgtccaggggttgagaaagctccttggtcaataccacacacacccccagctgcctggccattggagtcccttcttattgggcggaggtccagggctgaaatgtcctcagagctatgtggccatgagagggatgagggagggcagagggggcagaaggggaaggaaggactcatttcctcagcagctctttcacagaagcttcgagtccattacacacatgagctrttccttccagcactggagaggagggggcgaggggcgaggactggctgcctccaggtgccacatctgagcaggcagtgtggggaggagagggcagggaggcgggatctgcccgtgcagcaggagtgggccttggagactgatgggcccaggttcaaacctggcatcctcactttttgcattgtcaccttggacagcrtgtcacctctctaagctttattctcctgtctctaatatggagctcctggggcagtattttgcccagtagttagaaacgctcaatcagatcctgtttcagagtagcccagctgagggctggcacatacagaggactcagtcggtgtcacctgctgttattgtcatgactgttacgatgatgacacaggatgccagactggacctcatsagggcagagattgtacgtttctaaaaattgtggtatagtataatttacttaagtaatgtatgcatatcttgtacagctcacgttttacaaatgcacacacctgcatactacctggaccaaagtgtgaaccattcccacagttcccgtgtgcctcctccatcagtcccctgcagcaggtggccactggccctctagtttggcctggttttgagctttctctgtgtggattcattcatgtgtgctcttttgtgcctggttttcttcagctttggacagcaaggaatgtttgaggtttgtccgtgtcgcctgtaccagcatctgctcctttttaggctgagtcgtgccgcattgggtggatgtacgtgtaaatgtccgtggctgacatttgggttgattccagcttgaggctgctgtgacattctcgtatgtaactctttgcagacctcagcactcatttctttggggcacatacttaggagtgcaactcctgggtcagaggggcaatgtgtgtttaactttctttttttgttgttgtttttttgagatggactttcactcttgttgcccaggctggagtgcaatggtgcagtctcggctcactgcaagctctgtctcctgggttcaagcgattctcctgcccctgtctcagcctcccaagtagctgggattacaggcgtttgccacaacaccaggcaaattttttcttttttttagacggagtctcgctttgtcccccacactggagtctcgctctgtcgcccaagctggagtgcagtggcgcgatctcggctcactgcaagctccaccttttgggttcacgccattctcctgcctcagcctcctgagtagctgggactacaggtgcccgccaccacgcttggctaattttttgtatttttagttgagacagggtttcactgtgttagccaggatggtctcaatctcctgacctcgtgatccgcccacctcggcctccgaaagtgctgggattactacaggtgtgagccaccgcgcccggccacagccgactaattttttgtakttttagtagagacggggtttcaccatgttggccagcctggtctcgaactcctgacctcaggtgatctgcccacctcgtcctcccaaagtgctgggattacaggtgtgagccaccacgcccggcctcagtgaatgttttttgttgttttggttttgagacagggtctctcactctgtcacccaggctggagtacagtggcatgaacacagctcactgcagccttgaacttatgggctcaagtgatcttcccacctcagcctcctgagtagctggtaccacaggtgcaccactacacccagctaattttctgatatttttttgtagagacaaggtctcactagttgccaaggctggtattgaactcctgggctcaagtgattcatccaccttagccttccatggtgctgggattacaggtatgagacactgcctgtctcaagtgttttttgaaagaaggaagaaatttgagtcctttctttgtcttaatgccccagattcactctgtagccctgcccctgcccccagggcctggcagttctgggctggcactctgcccagaccctgggctttgggcttcgcctgctgttctgcagggtagggaagggcctccctccctggagacccactgattggctgtgtgacctcaggcaagtcccttcccctccatagtcctcactttccccttccgtcaagcactgggtgggtcgaagcttcccagctccctgtgtctgtggtctccctcatttgggagcctttgctcctggtgtttggtgcctcttcacccccagggtctcacccaccccaggcaggagctcagctggcctgtagcttgcagaaggaccatttgggaaagctggtgggcccttcattcttggtacccgccctaagagcctcactgygactctgtccaccctgggtgagagccctccagagtaggcccccagccgtgagagccccccacccactgaggcttggcatcaggtcgccctcggtctgaaccctgctattccctggctctgggactttgggcggctcaatccacctctcagggctgcagcgtcctcatcttcagggttgtgagcacccaaggaggccctgcctcattgtggggacagaagagaatggagcagtcacatgcctgcccctaaggagctgcactstasgggaggaagctggagaccaaacaggcaaagccacccaccagaaggatcgctccgagasaagaaaggagacaaaacagggcgatgtggtggagagtggctgtgaggggagggggccgctctagaggagcggccaggaaaggaggtgatgtctgagctgggacatgaaggttgaggagggggcagccgggcaaagacgggggcgggggagatgagagttcccggctgccggaacagcaagtttggcacatgtagggggtgaacgctggtgtggccgggcagaggcagtggagggtggagggaaggctagggagaggtgggcctggargggcaagccatggacagccttgtctgtggggcaggggtcagcatttcgttctaatagtggtgggaagccactggaggaccccacgttgaggggcgactgggcttggtttctgtttggaaagaccttggctgctgtgtagagcatggactgtagggggcaggagggaggcaggagcgcgggcctcaggatattcgtctgtcctgaggctgaggaggcgtaggtttctgcaggatctgggattttggctgctacttcagggatgggagagaggtagccaggcatcccagatgcttcgagaccttgctggcagcagagcacagtgggcaaaagttacctgtggagccagacagacctgtctgaacctccacttcaactcagccttccggggtgggcttgggattctcccagagtgaccagttcccaccgtcccagcccctggggacccagagaaacagagccagagggcattgagctggagcctgcctccctcgcttccgcacaccctgccgagaagtgagggcataggaagtgatggccgcaaggggatgcccagcccctctgctccagggctgctgttcacacggccacgctggagggaatcctgtggctttgtggttccttgtttcctgggctggtctggtggaagatggccatgagaaagcggcacttcatcttccttcgcccctgagtgttcagtgggtggttactcggcatcctgttgggcttccggtgtggtggctgggagccagagagaggagggcatgagagcwcacagagtcwcaggaggtgggacttggaggtcatctaggccaacttcctcatagggcagaccaaggctcacaaagggaaagagacttacctgaggctatacagcaggttagaggcaggacttagaccctgattctagactcctcatccagcactctttctagataagatggaggtatggaggttttggagccagacagatgtgggttgtagtcccagctctgtcacttagtcccagctgggtgacctttggtgagtgaccatctctgagcctcggttttctcctctatgaaatggghtgatggtagcacctttctcatagtggtgttgtgaaaagtggttgataatttatgacaggttgtaaagctcacaggacggtgcacggagttggcccttgggaggtgggagctgttattacctttgtggctccgtcatttttttttttttgagacggagtctcgctctgttgcccagattggagtgcagtggcacgatctcagctcactacaacctccacctcctgggtttaagcaattctcctgcctcagcctcccaagtagttgggattacaggcaggtgccaccatgcctggctaacttttgtattttttagtagagacggggtttcaccatgttggccaggctggtctcgaactcctgacctcaagtaatttgcctgcctcggcctcccaaagaagttgggattatgggcgtgagccactgcgcccagcccgtggctctgtcatcctaacctcctgaagcaccggaaagaatggctgcgtgctggccctcacatatgctgttttctgatgaacgcggttagggagggaagatgagaatgggccatggttggcccatctctctgctacttattttatttccccactatatttgagagactccttagccaggccacactactacccacccacccccccgccccccccacggctctggtgggctggagctgtgctgtctgccttcagcccaaataggggtgggggaggcggaggcactaagtgcaggtcccgggtgaaaaactgggcagctccccccaccttctgcatcagatccctaccacgcaccacyaatacctgtttgttcagtgtgacctagtggttaagaccaagggccatgggatcaacttgagcttgaaccctggatctgccattgaattgtcaccaaggacttttagcaggcgtgtcttcctctctgagccttggatttcccatctgtgaagtgaggataagtccctcccaggaagactgcaaatattcagtgagaggagcagcactcagagcatgcatggtgcatatctggtgctagactccaagaattggatggcactaatattgtaacagtgttgacacatgtcccaattgtttctctttccatagctgttcttagaaacttacttcaccatccgcccaccccacccccatcctgtgttcccgcagcccccttccctctaactcctcgcctgactgacttctctcagggtcaccttggactgaaatctttctccccctcccctcccctcccctcccctccacctcccctcccctcccctccctcacctcctctcccctctcctcccctctcctcctgtctcctccgctctcctcctgtttcctcccctccccttccctcccctctctctcctatctctctccccccctcctcccccctccccctggactaacacagatcaagagttcaagctctggcccagcctgcctgggtttgaatcccagctctgccatttactggagcagcctcaggcaaagtacttaattcttagcctctatttctgcataagtaaaatgggaataaggatagtgccaagcttagagagttgtttaaataagcgacgagattcttgtaaagtgccaggatcagtgcctgcagtacactaagtgcctartaaatgtcacctgatttattactaggcagggttctgatggagcagagcccctgccttttcacctctgcgttcccagtgtctggcagggatgggactggaagggatgcaggctctctaggggtttgtactatggcattggagagttgccttcccagtgaagcaggcctctccagaaaggggaagggactcgggccacatcttaagcatgtctgtctggcagatatttcccacaaccctgctgcacaccactgggtgctgaggatggggtgggggagggtgcagtaaggcygcccttagtgagctcaagtccacggaggaaagtgggacaaaacggccctgatactatcagagaatgaccagcccagggctggcaggttgcttctgaggaggctcctgggagtggtgatgtttgatgtttccttgtgggagtgacatagtagtaacttctgtctgcattagggctttattcagtaatcctccattctttcctkcccgcggtgttttactagtcttagcagtaataataatagcgtttcttgagtgtttgctgtgtgccaggtacagcactaaatattttatgttataaatttacttaatcttcacatcaaccctgtgaggtacttattattgttattcctgttttgtaggtgggaaaactgagggacagagaggtaatgtatctctcctctcagtcagtaattggcagagctaragtggaacctgggcagttttggctacagagtctatgcttttttttttcttttttttagcgaagtctcactctgcctgtcaccctggctggaatgcaatggcaccatcgtgcatcatggctcactgcaacctcaacctcccagactcaagcgatcctcccacctcagcctctcgagtaactgagactacaagcgtgcaccaccatacccggctaagtttttattttttaattttttaatttttttgagacagagtctcactctgtcgccagtctggagtgcagtggcayratctcggctcattgcaattgtcacctcctggkttcaagcgattcctctgcctcagcctcctgagtagctgggactacaggcrctgcaccaccacgcccggctaatttttggatttttagtagagatggggtttcaycatgttggccaggrtcgtctcgatctcctgacctcaagtgatccacccgcctcggcctcccaaagtgctgggattacaggcatgagccaccgtgcctggcctaatttttttgtagagacagggtttgctatgttgcctaggctggtctcaaacttcgggctcaagcgatcgtcctgcctcggacccccaaagtttgggatgacaggcrtgaaccaycacccctggctgaatccaacttgtgcttcctccataactgacttctacccagctggtcgtagtccttatgatcagccagtctcatggactctgagtgcctcaccttccatgagagtcctttgcagccagcaaagggaagaaattaatcttaggtcttcctgtacagcctgtgttcagcatcagctcaggggtgagcggatagggaccttcaaggaagggggtgtggaagtttaagacccagaaaggaaaggacytgagtyagggggaggaagaaggattagcctaggaagcatttaatggggagagaaaggaaactcagaaggctgaaaaagttggmattcaaactgaagcaacatttgctgagtacgtttcctgtgccaggcatggcagtgtctgtgccttccaggagctcccaggcctgtgggagagatagataaattagcaggtaaattgctgaatagtatttggtgaggtcagctaggggcggtagctcacacctgtaatcccagaactttgggaggctgcgatgggtgggtcacttgaggccaggagttcgagaccagtctgggcaacatgacaaaaccccatctctacaaaaaatacgaaacaattagctgggcatggtggcacgtgcctttggtcccagctactcaggaggctgagaatcacttgaacccgggaggcagaggttgcagtgagtggagatcatgccactgcactccagcctgggtggcagagggagactctgtctcaaaaaaaaaaaaaaaaaaaaaaaaaaagtatttggcgagtatgtgggcaggagcctttaaaggcccagaggaataggacctgggagactctgtctcaaaaaaaaaaaaaaaaaaaaaaaagtatttagtgagtatgtgggcaggagcctttaaaggcccagtaacttggtccagggaggtgatgtttgagttgggtcttgaaggatgggtaggagtttgccagccaggcaaagctagtagtagcagrgccaaaatttaaacctgaacagtctggctccagactctgtgttctttcctgcagcatgcttggccctgctgccctacaaggcctagccttgggaggtgagactctgggtcctgggtcactccacgtgagccctagaccattttcccatccaattcctgcttttgctcttcacaaactcccactctctcccccttctgcaaaggtggttgggagttgactagccttgtaggcagtctgtgtctctctaagtgactaggatttgtggtgtgctgagaagggtacacagattctaccckcagttctcctgtggcaggtaggaggcacagacagacagagaagcatttcctggtttgtttttccactgtttgccccgagcacatgaactgtgctttgcataaggcacctcctcagatcattgcaacaaccctggcaggtagaggtaatttactgccgttttaagcatgagaaaggtgactcacagaggttgagccatgtgtccaaggtcacacagctaagccagtaagtagagggactggaatttgcacctcaatctaactgcaaggcctgtactcgtgtttttaagccatcaggaagaataccaggttatgaaggccaygcccctttctggtgagtctcacctctgtgctggtaatcaggacacccaggaattgcaagtcggcggtagcaagcataaggttgcattgatttcagtgcttctcaacggacatgtgcatgagaatcatcaggaatgctggttacaaatgcaagtttcattgccctcatcctagaggttctaactcagtaagtgtcggggggagggtccaggaacctacatttccagcagaatgcctgattctgatgctggtggaccatagaatatgctagaaatctaatttattacatgtcttctctgggtccaacactatcctgggcattttatttggtcacttcagccatcagaacatcgcctggtagggggaatggatgcaaagggaggtgggagtctagagagagattcscagcagtcatgatgaacagccagcatgtccattccacctttagatcaattggataaggaaactgaggctcagagaggcggtaccttgcccaaagcttgtggtggcagagctgggattagaaagcagaccctcagcrgccgaggcctgtgttcctcctaatacccaacrtggttgcttttgcagacttccacacagagattcttttttttttttttttttttttcgagatggaggttcgytcttgttgctcaggctggagtacagtggagtgacctcaactcactgcaacctccatctcccaggttcaagcgattcttctgcctcaacctcctgagtagctgrgatcacaggcrcccgccaccatgcctggctaattttttgtattcttagtagagrcatggtttcaccatgttggccaggctggtstggaactcctgacctcaggtgatccacccacctcggcctcccaaagtgctgggattacaggcgtgagccactgcacctggcctacacacagattcttggggacatctgccaaatatcagcataggtaaatgtgggatgatcagtggtggcaatatctaccatttactgaggacccactatgtgccaggcacaaggtctagaatggttagcaagcaggcatggtcttggacagttgcacagatctctaactataagcaggttgctatgggagtttatgtcagaggagccatccctggcagagagcaggagcagggaagayrtccctgaggaagaaggatttgagaagagatctgaaagatgtgttaagtgttaaccaggcaaataaatggagagaaaaagagtctaggctgtgagaacagcatgtgcaaaggtcctggggtgagtgacctatagcagcaatctccaacctttttggtgccaggcttcgtggaagacaatttttccatggacagggtgtgaagaatggtttcccttatgagaatctaactaagcccgatgatctgaggtacatgaaactgttccacctcagttcatgttagttagattcatcaccttagttagattctcatagattctcataggaatgcacagcctagatccctcgcacgtgcagttcacaatagggttcgcgctcctacgagaatctaatgccaccgctgatctgaccgaaggcagagctcaggcggtaatgtccacccacagctcacctcctgctgtgcggcccggttcctaacaggccatggactggtactggtctgaggcccggggggctggggaccccagctgtgtagctggagtagagaggaagggtgaagctgaagggtggtcagggctgggtcccgcagggccgtgcagaccaggtgaggctttattttcctctataccaaaagactccatttgtgccctcaaagtaagaaaaggcaaaaatgtgtaacaagcagggtggaggtctcccggytctcgaaggggtgtcagcagggagctaagatgatccaacttgacttgagtggggagggcaagagtggcatcagaaaatggtggtggctttgcccaggccagtggtagtggtgagggagaggcagacagagaaactgagtagagtgggcagggcctggtgattgattggagtggggcaggggatcagcccrtcgctttgacaaatgagaaaacagagcccagaaaggttgcatgagccacyggagtcacacagtccaagcgttagagccagacgctaagctggagcctcccatcccagggccttccagccaaacatggactccaggccccagattcctggcagctgctctgrcagagtccctcttcccagtctcctrgtggcttcgtccctccccatgccctgctgcctgcagagtctggcagcttcaagggagtggggtgctttgaagcatctacagggagggcagtgctgtgacctccaaattctttccatgtgacctatgcgaccccagcgagaccagggccctcaggaccctgccctccccaggctttgacggagtccacagaggtggggtttaggggccagagccactgtgcaaacacagccccttgctggggagcsggggtgtttccagggacccgagctgatgccctgtcatgaagwgaaaggagacgcaggggccaaaggctggggagaccctctctgtgctcagtggggtctccccagcagcggggagctgcttccccatccaggctccgtaactgcaggctgctggctgctgtcttaggatttctgttttcttccctgatgtcaccccagttggcacctaagacctctgagatgctgctcagttaaatggattcttagctctgcaggcctcgccccacctccctacgctgctccaaascatccccctcctgaaaccagaaatataacccccctattatgaacctcatctcctcgaacctgagcccctattttccttaagatttggatctctctttggggttcaggccccccttttttctcactaggttctaggacctgcttyctgcttaggcaccttcttctccctggaccccttcttcacccttagaccctggacctgggtctgatccctctctggggactggaggctctgctgtcttagagaccagcacccccgacacacacaccccacggtctcccaggtttctctaacccccaggggcttcacccttctcagcttgacacacagtaggcactcaagagacaagcttgatcctgccaccccttctcccagccctccccatttgtggcccctcctgtacctccccaccctcccccgcatgggtatttttgctcagggagctcgtgctgtgtggcagctgagtctgggaagcagctattgttggctgagaacgtggggcggcagaaggatgggggctgagaggaggcaggaaacatgctcataggtccaggcccagccycctggtccccacaccccactgggtccaggtgaggccattttaggacaagtcaaagaaagcccccttcccacagccgggagctccgttgtggaaatcactgcgctaggggaagctggcagcaagtttggaaacaaggtggctggygaaagtgccaccggcagcttcggagagcagccggggcaccccttgagcctctgggtggcgtcgggacagtagrcaggactccctgtgtgttgatgctctgctgccgccccttctcgttgcttctcgtacctgtttcatgtctgctccgtggagcaggaggtgggaaccacaatttattgagcattaactttgagctaagctgtgtgctgagcaatgaatgcattgactcaattcatacctcagtcarctccaaggaagtgggtcctattgtgtccccatttaataggtgaggaggctgaggcttggtgaggtgaggtgactcggccaaggccacacaactcctgactctgtttttgcaggcttctgtagagcatctgacttcaaggctgagtgtgttttgcttgtggctgaaaaagaccagggacagcgaggagggaggaggccagcaaaagaggatgagaagcctgcatggggagcagggagtgccctttctggtgtggggacaggcagctggaagcaaatttcaatctggatgaggaactggcactgttctgtcctctggcccctcttgccccttaattgtgacgttacttctcaccgctgaaggggaaccgctcgagacgctggcttgtcctggcacctgccttgagcagaagctcagagaaagatgcatggagggaaagagtggggagcagaaacaagccatcaggtaccaggttggtggtcctggagccagtttatggttcatctagtcacaagggccmcgtctctgtgtttartgtcagctaatgaagaaattgaatccagtacacaaaattggattttgcagttttgcaaccagtctcaacmcccctctattgtgtaacgtgtttctttagagaaggaaacccacaacaaaacatgtgtgctttcctcctggcgacctctgatacctccattgaagacatggcttaacgagaactgtttttctccttctttcgtgatttgtgacttttcttgcaggctccaggtggcagtgagtcagccataaagctcgttcaggaaagtccagaggaatttttcttctgcatcaggttcaacttgagcagtgctgggtgaygcccagtgacacactcggttggggaaggagaggctggcacactccactagctgcttatctctgccacctccgcctccatttgtccctggcttcctggggcccagagccatctctgccagagcagggaggccgattaagtgacccgygggctccttctgcctgactcagctcagctccagccctctctggggagaatgagtcattttttcaaccctgaaatgtttctcttcatgtgggaaaggggcgggggtggggagagcccctcctggtcctctccaaacttgttcctcagctctgagggacacttcagccacagacaaagggattctagggcagctctggagagggcagtcagacctgaagtcagtaaaccacagctgtggcagccgttggagtctccctggacagaagcacactgggctgagtgggtggagtgtccctgtcagtcccgcactgatggatggtttctcccttggggatgggcctctgccccctgcttcctctgcccacccagttaagaagctatatgagcccgggtgtggtggtgcacatctgtagtcccagctacttgggaggctgaggcaagaggatcgcttgagcccaggaggtcaaggctgcatgagctatggtcgaggctgcatgggctatggtcaaggccrcrctccagcttgggcaacagagtgagaccttgtctctttaaaaacaaaacaggccgggtgaagtggctcatgcctgtaatcccagcactttgggaggctgaggcaggtggatcacttgaggtcaggagtttgaggtcagccagaccaacatggcaaaaacccatctctactaaaaatacaaaaaaattagccgggcatggtggtgcatacctgtaatcccagctactcaaggaggctgaggcaggaaaatagcttgaaacccgggtggtggaggttgcagtgagccgagattgcaccattgcactccagcctgggcaatggagtgaaactatgtctcaaaaaaaaaaaaaaaagaaagaaaattgcccccatctcccattttctgtctcccttcactacctcattgctccccttagcccctcccacagtctaacatgctgcatatttgatttgtcttatttattctgtctcctactagcatatragtttcatgaaggcaaggcttattttattttattttattttatttttagttttttgggacggggtgccactccgttacccaagctggagtgcagtggcacaatcacagctctttgcagtctcgaactcccaggctcaggtgatcctcccatctcagccttccaaagtgctggggttacaggcatgaacactgcacttggcccamaggcaaggattttgtctgttttgtttcctgctatatctgtcgagaacagygctaacacryagtaggcacacgattttaaagagggtaagaggaaaatgaatgagtgaatggatgtgagcccctggcagagtatccggcctgcagtcagggctattgtgtattttgatccataaccctccccccgccggttccagctgtgttgttctgggaggctagggcctttctccacctacgccctcaaggtcagcttatccactcttgaggtttcatgcttaatttttatatttgagcttctcataccagtgtgtgagattgccctggggatcagagtagggtacttgcatcataaaataaaaaggtactattttggagcagaatgcagaattggcatgaatttttgagattcaaaaggaaatgagacttaagcttttttcacagcttttagctgtgtcctcagtcmtgccagggcacaggttgactctcctctgccatgtgggtgctttgggaaagtgtaagcagccttgtttttggaaatgaccccaacccctgagccctgggacctgccctccctccaaagccccagtgaggggttttcaccaaacatgcacaaattccagcagagggcggatccatgtgcgtcctcttccgggggccatgcccacttcccttcccggcctccccgtttctttctctcagcagagtgctagatcagaacctcttgtccttcctgacaagaggcccttgtctgtctgccccctttcctgtgcctctcctctccatcgctgggttttcttgtccttttccccagctaggtggttagatcaacttccaacccctcagkgccaaacagtgccaccacactggtgtccccatcccctatgccagcagtggcactgccattttggtcacaggcctggggccctggagtgtgacacatgtggggggcctsgcacagccccaacctgtgcctcagcctgcgccttgcactggccaggtgagaagggctggttgctctcctgcccccaaagaacccactggtgtttccatggcaactgtgcagccaggctgcctgggcgtctgctgggctaagggctaccaagtcctccacaaggtgcccatggttgtgggaatggaagcatttgctagaggtgggtggcactgacctgtccccagccgttagggagggagctgcactccgggctcaggtggggwgtggggtctcctggttttatccacacccccatccccactccatctcactgagaagccgccttgccacttctttctgagcccctgtttcttcatctgtaaaaggggcatataatgctgacttcagaagttgttccagctccygacatgagccaggtggggcagcagtgagggagcttcaggcagaggaggagggagacaagaccagaccaaagggtggccggggacgcagctctgtttcattcggacytgggaatcacaccaactggccccttccaagcggtcttagatcctgaggaagcattcttccctctctcagcctcagtttctccttctctaaaatgaaaatagggtgggcacggtggctcatgcctgtaatcccagcactttgggaggccaaggtgggtggatcacttgaggtcaggagttcgagatcagcctggccaacatggtaaaaccctgtctctactaaaaatacaaaaattagccgggtgtggtggcacgtgcctctaattccagctacttcggagactgaggcaggagaatcgcttgaacccgggaggcagaggttgcagtgagccgagattgcgccattacactccagcctgggcaacagagcgagactccatctcaatcaatcaatcaatcaatcaatcaatcctgtgtgacaggactgcagaaagaatggagaaagataataagtgcatgacaagcctggtgcctggcccaacacaccgtaggtgctcattccatattgattacttgtgaaggcacccatgggccactgcactggaaattgtctttcctgtggtcaggcctaggtccccaacagaccctcttccaggacatggctgctgggggccccagggctgctcctcccagtggagaattcctcttatgttattcacacagagatttccccaggaagtctgagcccctctttgtgtatcttcccagctgttatctgggcctcctgaaggcctgcctggctttctggtttatgttagggttgtttatatggggtcttatctctcccaggagcaggggccagcctggggagcagcaagattgtgggctttgagtcagagcaacctgggtttgagtccccagctccgccacgcactagctctgggacccttggcaagtgacaccacctcttggaacctcggtttcctcctctgtaaagtggggatggtagtacctccagcacagggtgatcatgaagattatgtgggaaaatatctgcgcggtgcctggcatgggttaaatgatgagttacagacagctcctttccccttttccaaaccaggaggttctgcagcagcaggatcctagaggctcagacccagggcaagggaagaccatcacagctcctcaaggcaccacctcggcagtaggcaggggaggctgcacagccgagctccacgctgctggcagctcccaggactccatggcctagaggaggctggggacctcaggaaccctccgcagaatgaaggaagggtggggaagaaagacacagagatgaggctgcggcccytataggagcttgggtgagtgtggaagataagagcacaggctctggaacagacacgtgcgtccttcagggagctgtgtgaccccctgtgagtgactcaacctctctgagcctcagttccctgtctatgcaaatgaaggatgatggcataccatatctcctggggttgctgcgaggcgttgataatacmtggaaagtgcttagcacagtctggccaagaattttctayttatttttaggttgtattctcaggacccactgacttctggccaaactcttcaattactcakaaaacagtattaawttttttttaaaaagcttatttctccagcaccttccatgagccctgcaggcaacgtgcttagcgcctacctctcattatcccatttgatcgtagcagtcctctgtgggkttggccctgtcaccatccccattttataaatgagaagtccggtgacctgtytgagcccatacagctgttgacggctggagcctggagatagtcgtgggcggggttagtgtctcaccaggtatcagctggacgcagcaaacctcaaacagaatccatggggagaatctgtgaatgagcttgtccaacctgcggcccgtgggccgcatgtgacctgggatggctttgaatgcggctcaccacagattcataaactttcttaaaacattctgagatttatgcatgmacctttgttttttagctgatyggctatcgttggtgtattttatgtgtgacccaagacaatatttcttacattgtggcccagggaagtcaaaagatgggacgctsctgccgagtgtaaacagaagatctggagtggggtggggacacctgtggactcaagacagcctgggtggcgagtggtgtgtgggggctggcactagaagccatgggaccgcgtgtgtttgttcagcctgtctcagctgaactaatgtaaacacccagactgcttgttggccctctgggggaccaagacaaactagggaacagtgagccgtgcctcccggtgcctggtagggagtggcgagaatgaggagccaggtctcaggagaggctgaggagagttggacagggatggagcctggctttcctgcccagttcacagaggggagggcacagctgctggcttggagggctcccargaaggccaggagcagaaagtctgagaagcagattgggggcagcagagggagtctggcycttggtgccgggggtgccctggtggacagaggtgggggcagcatggagccggcatttatggaggccctagtatgtaccaggccatttagacacgaggtcttatcatgtctctagaaaagccctgygtagtccactttatkattatgattatgattatgattatgattatkattattttgagacggagtctcgctctgtctcccaggctggaaagcagtgatgcgatctcggctcactgcaacctccacttcccgggttcaagcgattgtcccacctcagcctcccaagtagctgggattatagacgcacaccaccacgcctggctacttttttgtattttagtggagacggggtttcaccatgttgcccaagctggtctcgaactcctaagctcaggcaatccacccaccttggcttcccaaagtgcttggattacgagcttgagccaccgtgcctggcctcactttattattttgacttagctgatgagaaaacggagcccgggagattgtacagacccagctccactgaaaacccacagaatttggcttcctgggagggtgagtttacggaagcattttcggatagtattccttcgcatctgcctctgctgacgtcacatttcccatgctgactttcttctgaccctcgctcagcgtctcccccgacagaagtgcggcctctggggagctgtagctcttgctgcaaatcccctcccccgtccgctttttggcacactgcctgggggcctggccaggctgaagtgactgtcaggtcgggttagctccttggaaggctggtgtgaccaactcaggggtgtcgcctgcctctyacccagggaggaggattttgccacctctgcttggataggcttgtgaagtgggcctcaggaaggctcactggttctaaatcttcaaaaaatgggattttagaagttgctaaggcctgaaatatcaccccacccattttacagatagagaaactgaagcccagagcggagaaatgtctgccccaaagacagtgagaggctgaggcacaagggaggggaggtctccagggaggacacccctaggccaggctgacctttgttaagggagtgggacagggtcaggaaagggcagggatgaaggaaataagttccccarctgcgtcatgacctgaaacccaatttcacagctgctcccactctgctgccctccccaagctgtgccctggaaatgtccttgggccctcaggaacgctgatcagttcctgcacatgcgccagcagggtacttgtttcattgggtttgggtctctgcgagtccacacgagggcctcctgctccccacttgccacgccaggtcttgcccactgctctcccccaccgtttccctcactcttgttcatctccgagtccaacagctatcacttgagttgtgcagagctgggaagaatcgtttaaccgtcacagcagccagcgaggggacctcgtccatgccgtctgataccttcaaggtgcaccttkgagggrcarrccctgctttgcatgtgttttgtcccmacttygagaaagagatcgcggtggctctgatttaagttcaagaacattggggtcacaccccgrgcctggatttgaaccaggagacagacactggcaccccacaccttcggccacacctgctaaagccagggacctacagaagtcacatgacctgtctgagccygcacagctcttgactgccctgacccactcgtgcgtctccagaggatctgtttggatgcaaggtggttaggaccccaccttgagttggggagcaggggctcaggagaggccgaagagaactgggcaggaatggaaccgggctttcctgcctagctcacagaggggagggtgtggctgccagcctggaggggtcccaagaaggccaggaacacaaagtctgagaagcgggtggggagcagtagaggggctccagccagcctgggcccatgactccatcccggtcaggggaccaagattgctcaatccccagagctgcagatgcgtcaccagctcagcgtcgccgcgggctggactggccttgtgacaagcaaacccttttccccatctgaggcctgcgagctggccttcccctctgtctgttcattttgggagaccctcccaacagcagcaggaacaatggcagccaccggatgccaggccctttgcagacacgaccttgtttaattctcagaagagtcccgggagctaacagtgggcgataggattcccacttcacagagaagactrggatcgcatggcagcaaagcacagggctggctcgaagcccaagtctgtctgacctattctggtgggtagcaaaatatctcagacatattaaaagcatcaggctcagtaaaaccaaacactggtatgtaagtgttcagcttaaggaataaaacatcccaaatgcagttgaatcccccatacccccacacccccagtccgtttcttaccactctctctcccaggggaagagactgggagagactcttcagtgactgtcttgatactgttactcctgacctcaggtgatccgcccacctcggcctcccaaagtgctgggattacaggtgtgagccaccaagcgcagcctgattctgcctccctaaatgatacataggtatgatgttgctcactgtttttgaactttcaataattgattggaggctccatgttgacttctgcagcttttctgtcttcctgttgtttgagttgcagccacttggttttcattaccrtgtagtattccatcccatgatgtggctctcctgtggtttatccaggctcctatagatgggcatttaggctgtttctcattcacaaccacagcacatgctgtgtgggacttccatattcatgtctcttggcgaccacaggagagtttctaagaagtatgtgtgttatgtatgttaagaactggaatcaggccgaggatggtggctcacacctgtaatcccagcactttaggaggccgagacgggtggatcacctgaggtcaggagttcgagatcagcctggccaacatggtgaaaccccatctctactaaaaaaaaaatacaaaaattagctcagtgtggtggcgcacgcctgtaaccccagctactcaggagtctgaggcaggagcattgcttgaacccaggaggcagaggttgtagtgagccgagatcgtgccactgcactccagcctgggcaacagagcaagactctttctcaaaaaacaaacaaacaaacaaaaaactagaatcagataaacccacggcatcatgggattcctcactgagagaacaggccaacaatattggggttgctgttctgagggtgaaaaaccccttaaggacagtaatgttcttctgatttgctgctgtaaacagcaccaagaacagtgtctggcgcattgtgtgcgtgtagtaaatctgttccctagacaagaggacatgtgccagctactgtggcaggtactcaacttacacagccgcactcagtcactgtgaggaggggttctcccaaatcacaggtaagctgactgtggcaccagagaggttaagtcccattcttaaggtcctacagccggtacccagrttgactgactccagaaccagcactctttcctgacgctgcctgtgtagacagagggagtggattcatagagccctagaatcctagaatatggggaaaatagggccagctttttttttttttttttttttttgagacagagtcttgctctgtcacccaggctggagtgcagtggcacacagctcactgcaacctctgcctcctgggttcaagtgattctcacacctcagcctcgcaagtagctgggattacaggcatgcgctaccacacctgtctaatttttgtatttttagtagagatggagtttcaccatgttggccaggctggtctcaaactcctgacctcaagtgatctgcctgccttggcctcccaaagtgctgggactacaaacctgagcccccatgcccggccaggagcagcttttaatgcctagttgcctatatacaagcccctaggactttccaggttgtcctagaygccrtgagggtgaggtggcaccagctggtagatcacctttggcctgggataccccagacattggggctgagtgacagctcatctctgaggttgatccattggggaactgcaaaggttgggaccccagtaggcatcggattcagctgcagttggatggaggtggcagcctgaaccaaccaaagaattatttgcttgggacatgagcagacctgggctcaaattacagatctgccacttattagctgtgtgattttaggcaagcctcttaacctttctgagccttatcacccccatctgttaaataggtattgactctggcttgcagagagatagatttgaaattaatgagtgtgacagtcttaacacagtgcctggatagtagttattaattacagtacaagggagggttttctactrgggatacatacaaatcactacagatacatacagatggggcagcatgggacacagaggaagacttcatagaggagatgacatttcatctgggttttggagggtgaataggagttctccaagccaagaagcagaccataggtcaaacagtttctatgcgtcctggactagatttggtattgagagggataagcacagtgttgtttacaaaaacaacaacaaacaaactcaagttgcttgcagtagataaagatacatgatcccatggaaatggcacaggccaggtactgactgaatagacaaagaatcagtggcgttggggtcttaggaacacgtgaaagctgtgagccaggacagtcaggaagttccctggaggggaggttggatttagatgacaaaggaagatggagaggggctgtctgacccttgatttcctgactgggctgggttaggaaaggggtcaccyagcttggcaaggggctggggacatacctagtaggttctgtcagaagccccactgtgtccctgtcaccagggctggggccgatccctgccttggaagaaaagaaaagttgttcctaattgttaattgtgcaatggcagattggctcccgaatgggactgaactgagccaagccctggagggagaggaggagctcaggctgtatcactaccgagccaggaatttgggggcccgggagggggtttgggaatgtggctgcgtgagtgtcccaggaagggcctagcyagcgcccccttcccagaactcccacgccattctgcaggctcccataatgcytgagtatcgggtagaaattgggttcaaatttgatcccatctttttaccagctgtgcaaccttggacttgttacttaacctctctgtgtctcttattccacatctttcacgtggggttgctgttatggttaattagaaaacacacgtaaagtgcttagcacrgaacctagaatgaagtcattgctcaagatgtggcttttgctggtgccatgtcgttggtgttaccgtttagcagctgcagcctcagcactgtcatcattgcccctacatctgtaacccaggccacactactgctcaggttgaacccagggtcattccagctgctcgtaccygttctccgtgagccgggacattcctgtgccacaggcattaccttggcagtgcctctctttaggaggcagcacttgaattccccatgtgccttttcatggattatcgccttaattcccaccatagcccagtgaagtaggttcacatgtccccattttatagatgagaacacatgctcagagaggtaaggcaactcacccagggtcacacagcagtaaattacagagagtccagctgaggtctgtctgttccagaacctttgttctttccactccaaggttgagggagcagcttgttctcattggatctgagcctggtgctcagccccctgctcccccacycccacctgcatcatgtattcctctccctagttctcatccccgcccagctctgctctgggcctgggaccactytggaccaagactgcagctagggcagctcctgtcctcctgagccaatgcrgtcatcattcccccactgtcagctggaatcagccctcctctccccagccaggcgtttcctcccgggctccctccatccccccaggcaagcatgacacatgtgtcttgagggggatggagtgtactggggaccagatgggaagctgagcctggggtgggcttgtccagcagatatgcctggtcaccgaggcaacgccagctcagcagcatctggtttggctgcaggtccaccctgattggctggggctagacaaggggagttggccttggcattgtgggcaggtgaggggacaagcacagaggcatcagaktccaggagggaatagtggggcgcagagggcagagtggaaacaataagtagtttagagtcagacagacctggtgtccagtcctgccctgtcactttctggctgtgtgatccaagcaagtcactacccctctctgagttgcagttttagcatctgcaaaatgagagacaatgatagtatttaccttacatctgcatgagaggatcaaatagcagtgctggtgatcacaatactttgtgtctttgaactattttaattctcatagctacctatgagagtggggctattattagctttgtttttttaatgataaaccaaggcacagggaggtcatatcacttgcccaagtcaaacaaatagtagtaggcagagctgggatttgaatacaggcggtatagacccatgtccaccacactccagcctgctgcatcctcctacctctcagtgacaggacagcacaygggacacgtgctgtgtcagctggggatgctgcttgctctttttatttatttatttaagagacagggtcttgctttgtcactaaggccagagagaagtggcgcaatcatagctcacagtaaccttgacctccctgagctcaagcgatcctcctgcctcagcctcctgagtggctaggatgataggtgtgtgccaccacaccaggctaattttttaaatttttaaaattatttttttgagacaggattttactctgtctttcaggctggagtgcagggatgcaatcacagctcactgcagcctcagcctcctggggctcaagcaatcctcccacctcagcctcctgagtagctgggactacaggtgccccccaccatgcccagctaatttttatattttttgtagagacaaggttttgcattgttttccaggctggtcttgaactcctgagctcaagcgatcctcccgccttagcctcctgagtagctaggacgataggtatgtgccaccacaccagactaattaaaaaaaaaattttttttttttttttttgagacagaatctcactctgtcgctcaggctggagtgcagtggcatgatctcagttcactgcaacctccgcctcctgggttcaagcaattcttgtgcctcagcctcccmagtagctggaattagaggcatgcactgccatgcccggctaatttttatatttctaatagagatggggtttcaccatttgkccaggctggtcttgaactcctgacctcaagtgatctgcccgcctcagcctcccaaagtgctgggattacaggtgtgagccactgtatccggccaattttttaaatttaaaaaaatttttttttragacaggatttcactctttcaggctggagtgcagtggcacaatcactgctcactgcaacctcaacctcctagggctcaagcaatcctcccacctcagcctcctgagtagctgggactacagatgtgcaccaccacgcctgctaatttttatatttttttgtagagttggggttttacaatgttgcccaggctgatcttgaactcctgagctcaagcgatcctcccacctcgacctccgaaagtgctgggattgcaggcatgaggcactacaccaggctaattttttttttttttttttttttgtggagacagggtctcactatgttccccaggctggtctcaaactgctggtctcaagcgatcctcctgcctcagcctcccaaagtgctgggatcacaggcgtgaacccccatgcccggcccgcatgctcttttctcacttgccctggaagcctgcgctgttggtggtgcatgggacacgcctactgagtttataaatgggtggacagaggagggcacagatgctatgaacattcctgcatgttgggcaacaaaagggaggcactgggggtgtgaccctgcaggccctgtggtgtgggcagccagccagacccagccatggccctgagctggccagggagccccactctgaaaacaacagcccccattcatcaagtccctattgtgtgccacacactttgtctacattctctcatttcatcctcactaccagcctgattgcccacgatggcagaatgtgtctttgacagaagctggttttgaatgtaggtccagctttcctcacaggggcactgagctggggccatctcttgcctcctgaggggtgggtgatggtttccttgtcaacatgtttttgtaggatatgttgctgattgtgggttgagggaggaggctgcagggtagggttggaagagcctagatgaagattttcatcctggttggccccttacacaaccccttctattccttgatccttcgttttcttcrttcgtcaaaagtagtttatgatcagggacagagcagagggctgggagagccaaggtgaccagagtcttggccctttaagacttcatcgtccagtggcagggacagtcacccatacccaagtacccaaatcatccctggaagctcgggtggggtctgctgggggtgtgtgcagagtgcagtgaaagcacagggccagaggtggcaggagggatgatgtggacacaggttgttttgcctttcttctgctaacagcaacctccttcctttgggaattgttcctccccaattccttgtggtgcatgggacacgcctactgagtttagccgattaaccaggctgtcaatcacagcatcaggccccacctctactaagtcacaggggagggcacaggaaacaggcctggccaatcagagttcttccctgggactttctaattcagcccagggagagagaaggttttttttctctagggctctcagctaccacaaggtaagcctggccraattctctgggtgtgaaggatgtctaatctcagagatgagagtgaaggtracacacaaggggaagatgaggcatggaagatgaggcaggggagagaaatctagcagcagcatctgaactcctggatcgtctcctgcctgatgatcctccctccctccctctgaggcaatgtgagccaagatgtttgttttgttagaaaatccagctggggcctggcacagtggctcacgcctgtaatcccagcactttgggaggccgaggcgggtggatcacgacacgaggtcaggagatcgagaccatcctggctaacacggtgaaaccccgtctctactaaaaatacaagaaatagccgggtgtggtggcgggcgcctgtagtcccacctactcgggaggctgaggcaggagaatggcgtgaacccgggaggcggagcttgcagtgagccgagatcgcgccactacactctagcctgggcgacagagcgagactccgtctcaaaacgtctcaaaaaaaaaaaaaaaaagaaagaaaaaaaaagaaaatccagctgggtttggtttttatcattaacagccctgagggtcctgattgaagaggcttcagagaggaggtggcatttgaagcatgtgttgaaggagttcttgggactaacagcaatggtgaggttatgccaagccaaggaagctggtgggaaggatgtgatcatgacctgcttgggacaatggcaggtgctgatgtccgggcagatcctgaagggcctcgtgccacagagcagagctccgacgcattgactcattccttcatgcacccattcattcacccaaccaagccagcgctcactgcataccaggcactactccaaacactttctgggtaactaactgcatcctcccaacaacttggtgggacgggtactgtgattcaccmctttacaggtgagaagacagaggcacagagaggttaagtaactcactcaaggtcacagttggtaaatgacagagccagggtttgaacgccagcagtctggctccagagtttctgtccttaaccacagagggggagtgaccatcctcccctgactccagcccagggttctttctgtgtctcatatcccagtggggacaagactgcagtgcctgtgtctgggatgtggccctagaactctggaaccccagtgtgcctgagtgaggggaaaggagagagggaaggccctgtggatccttttagaggacacgaggtgctgtcctggcccagttccagtcccaactakcgaggagcctgtgccagmttcctgctaggtgccctgctgtttctgcaaactgtgataatctccagaaacagtgaatgatgggctctggctcagtccaactaagcctgctgcargagatggggaactttaagaagctgtggctcatagcccaggtactggggagttttaaaactgctcctagcaagggaaaccctgggcaggcaggaaggggagggggctctgagacacggcatcagagaaggagccctgggggacttgcagcattcgctcaggccccagctcgcccctcagtacccagwctcaagcccctcccatgcacaaaggctgttcaccgtctcattcagaggttgggggtactagccctgtttcacaaatgaggaggttgaggctcagcaagggcaagtaacttgcttgaggtcacccagccaattttcctgggtccatgtccagggccctggacagcctcatgaaggctgcctctttgatcttgtctctgatcccaaagggtttctggaacacacgccagagctccctcaggcctcctggcccctccctctcacaagacgcccttcctcccttcctcttgttactcccaattccagagaagggctgttcccccaaatagagagtgctttgccgtttgtggggaggatcctggcaacccctgggggtcctacacaggtggtctccggggtgggggctggagggtaagacttccggttgtccctcattggctaggccctagcagggtgtatgagggcaggacagcccatctccagagcatgcacaaatgcttgttaaactaaagctggggcaaagggagtgccatttcagctgagactcaaaaggttggccattttctgacagcacagcagagagtgaggtttaccaggtggaggaaacagcatgagcagagrtctggaggtagagaagtggaaaatgtctccaggggaagggcagctgctttccatgtgggtgggagcaagctcgttcatggttccaagctaagagtgagccagggaggttttgaggggtgaccccattctagaccttctggggggatccagaaggcgtgtgacccattgggatcgcagcaaaactgagccaggcacctcctctcttctgtcctgcccagatctctgcctgacaaggatgctcaaggcggggccaacctctcaagggggcagggcctccctctcaagggggyagggcctctttcctgtgcctggccacctttcatagaggcttatctgtcccttcccattttctgtctggagcccagtgccctaggagcagtggccctgcgtgggtacagcctggccgccacaacaggtctggtcttgccagccaggcagagcttccactttgtacctcagaggtacaaagaagccccagccccagacccagtggggacaaatgacaggaatgcctcctggggtgcaagaaaatgtcctctggaggcccctctgctgctgacgtcctcacatcaatgactgtagtgatcatgtttaaaacttgctttttatgaaatacttaatatgtgccagccactgtgcttggcrctttacacagactctagtggtgtctcactagatgctcataacccccggcaaggaagccactgccaccctcaccatgcagagggaggaaattgaggctccgagaggtgacatgactcgctcaacatcacacagctgctaagcagccaaatgtgtctgaccttgagatctatcttccacccatgatgtggagatgctagctccagccccccagagtcgctgtgaagagcaaaagtgaattaaagggaacgagcccgctttggaaatgttaaagccagcattacagggcccgggctggggtaatgtggacaggagttctaagcagggagcagtctgggagctgagacccatgctggacccagaggaaggggagagtcttgagtgcagggagacgagggagtcctcggtggacctcagtcatcctaagcccaagagttggctcagtcctcgctgccaggcccttagcatttgtggcacagttgcagggctttggaaggagcactgggccgggagtataaaagcctgkcttctagtcctgactgtgtccctgactcagcatgtccagggggcctcagttagttcatctgtagattgggggggttggtcagacagggctcatggagaccttcctcgactcctccccagaggcttgagcacacctcgctgctgccctgtctttgtaacactcatcgctctctgcagtgaggccatcactgtactggttagggtcaagttggagtcatattgcctgggttcagatcccaaatgccttagagctggatgatcttgactgtaacctttctgtgcctcagctttctcacctacaaaatagggtcaataatatggccgggtgcagtggctcaggcctgtaatcccactttgggaggccgaggtgggcagatcacctgaggtcaggagttcgagacagcctggccaacatggtgaaacgccgtccctactaaaaatacaaaaattagccaggcgtggtggtgggcacctgtaatcccagctactcaagaggccgaggcgggagaatcgcttgaacccaggaggcggaggttgcagtgagctgagatcacgccattgcactccagcctgggcaacaagagcgaaactccaaactccatctgaaaaaaaaaaaaacaaaaaaacacttaacatatagtatgtggcacacagtaagcactcaataaatgtaagatgctattgttaatattgcgactcttagtaacattgtttattgtctctccctgtattacaattcaagctcctgacagcaaacgctttgttttgtttaatgtattcctggtgggaagctcattttttggcacatagtaggtacataataaatatttgttgaatgaatgaatgagcaaatgaatacacagacaatgacattgacatccccagcgtccaggaggccccatatggctggatgtggagaaggatggatgctgggaagacaaacccaggccagctgcttgctcagggcccagccarccctctttgttcctagcagcccttggggcaggccctgtatcagtctgccctgatggggggtccattccactcagaacagagggttctctctggggatcgaggtggctccctgtcctgccaccatgaccacagcggtatttgtgggtgtctgatgctgttttccagctcagattccagccaccaggcatgggggcgaacgtagatttttccctgtgctcagcagccctccctcccaaacccacagagtggagcccagcctgttgtctctttaccacccgtaccygccctttccagaggccactctcacgaactgaaatgctcccactgccccttacacagctcccttgcctccctcctgttctagaatttccagatgggactgctgacacagcggttctcctgtgagtccttcttggccccggtggtctgagcgaccctgaggacgttggtgtatgtgcccagttttgagagtgagggacagattgttatgccattctctatacagagaaaacgaaaactcagaggagaggtttgctggaacatttacagttgtcggaggcctgagttgggattcactcaagtctgtttatttcttttgccttcattcattcattcaactcgtatttcctgagtacctgctctctgtcaagcactgcacagcagtgttcatggtgcctgccttgcccagggatccagatgttaatcagaccagaagttagcctggctttgtagactgtgtgtacaccagtgttgtccagtggaactttctgggatgatagaaacggcctgtgtctatgctgtcgagcctatgtgtggctatgaagcatttgacatgtggctagtgcaaaggagggttgaatttttcactttatttttaattaatttgattgaaatagccacatgtggctcatggcgcttctatgttggatgtcgtagttctgcatagatctttgaagatgtcgttcaaggccttaacctgtgggtctcaaactcaaacrtaagcmgggaccaaggatgggaccgggctgattttgcagaggcatcttcagttgtgtcttctttcccagtcgtcagtatgttcagcactacaaaggaatcagtttctgttttccttgaaacatgagcccctccagacctatctttcagttttccatttttttttcttaataaggtgtaatttccattacagtgaaatgcacaagtgagggctgaggagttttgacaaatgtagacacctgtgtaaccacagaatcaagatagagggtatttccaggacattctcattccccagaacattccctcatgtgcccttccagtaagtctcatcctcggaggtggctgctgttctgatgtctgtcgccatatggcttagttttcttgttttgaagctgcatgtaaatcatttcacttttgaccaagacaaggatatgagaaatatttctctcttttttaaaagtaagaaacaacattgacatgatgaaaattggcagctcaccctggggccacagtgaggaggagataaggggttggggtgggctgtggaaccccagggactcgtggcctgtccagaggaggtggccactcctcagccccagccaccacgtggagaatgtggtcccagcattggcgtatcttttttttttttttttttttttttttttgagagggagtctcgctctgttgcccaggctggagtgccgtggcgcgatctcggctcactgcaagctccgcctcccgggttcacgccattctcctgcctcagcctcccaaatagctgggactacaggcgcccgccaccacacctggctaattttttgtattttttagtagagacagggtttcactgtattggccaggatggtctcgatctgctgacctcgtgatccrcctgcctcagcctcccagagtgctgggattacaggcgtgagccactgcgcccggcccttttttttttttaaggaaaatggaaactattcatttttttgaaataatatccccaaagtgttacatttcaaaaacttttctaagccaggcacggtgactcatgcctgtaatcccaacactttgggaggtcgaggcaggcagatcacttgaggtcaagagttcgagaccagcctggccaacatggcaaaaccccctatctattaaaaatacaaaaaattagccaggtatgatggcgcatgcctcctrgtcccagctactcggaaggctgaggcaggagcattgcttgagcctaggagtcggaggttgcagcgagctgagatggtgcccctgtactccagcctgagggacagattgagaccctgtctcaaaaaacaacaacaacaacaaaattcctagtgccgtaggccaaataattcacatctgtgggccagatggccagtttgtgagttctgccttgggccagttggaatgttagtaataatcacagctggtatttcctgagtgcttcctttgtttcaggtcctgtcctaagtgctctctattagtaagtcatgtaatccttgtaacaatttattaatagatccactttacagatgagtaagctgagccatagagagggattaagtgatttgcccaaggttatggagtgagtgcttgggagagccaggatttgaattctgactgtttctccacaatctgtgttccccaccactacaaatgttcctctcgagggcaagggtggagggtgaggccgctggggatggttatgccacttgggcggagctttgacagccaccacggtgccacctccctgaacaggtgaggagagagtaccacggccccaccctgctgggattgccctggctcgggcactttgcatgtctgggcaccttggctatcagttggtggagcccagttttagggagttctgggaaagcagccagtggtggggctgggtagatggaagcctagtggatgaggagccatgagaggcatagaaagcactgggcaagtgggggcagaaatagcaggagcctggctgggtagagcccaggcccggggggtggcaggggagagckggagatgaggatagagaaatcagccagcccaggcccagggccacggcaggctgctgctgcccaggggccaacagctggggcattcctgccccctggtgattcatctggacaagcctgtcatttggggaaggtacgggaggggaatataaacatcaccaggcaaaacactgctacatttccgtcatcaccttccacctccaaagggggcagggcgggccaggggaggaaactgaggcccagggagcactcggcttgaactcatgccaggacttctggctcccactctggcgttctgtgcattcctcagggcagggggttgggaaaagggtctgtggtcatttctggagcctgaraaggggcatrgcaggaaggggccagcagacacatccagatcctctctggcccttatcttacttgtaagtcaccgagtcagggcctgatatgcagtaagtgccaaataagtatttgccattattaacggattttcctaatttgatcctcacacccagttctgagataygagctgttatcatcaccgtttcaccaatgagaaagtcgaggctcagacaggtagactccccgrgtcacagagccagaaagttgttggcaggattaaaaagagtgatgtgtgtagggcgcttagcaccaccctggtgcacagcaaggggcttggtgtggggcctgggccagaagagggggaggtggcaggactgttcaaagagggcctcctggaacaggtggcgtggggctggacgtggggaacttagcctgttaagctgctggttcctttggggctaaggttggtttctgactaagacctaatacccgctgggtctccccactctgagaatgcactgcctgctagaatgccatgcagttttgggccgcacttgggcctcacrtgctttcctgcagctccacatcaggggagcctagtgagcctggcctggaaggggcggtctggcctcaaggtggccatgtcacctctctgagcctcagtctcctcatctgtcaaatgggaacagtgctacctaccacacagggttgtggtgagggcctggcatcacagaacttgcaggagatggctgttgaattggcctttttttttttttttttttttttttttctgagacagggtctcactctgtcacccaggctgaagtacagtggtgcaatctcggctcacggcaacctccacctcctgggttcaagtaattcccctgcctcagcctcttgagtagctggaaccacagatgtgagccaccacgccaccatacctggctaattttttgtattttttttttgtagagatgggtttttgccctgttgcccaggctgctctctcctgagctcaaagcaatcctcccacctcagcctcccaaagtgctgggattataggtgtgagccactgcacccagcatgaattggctttttgtttgtttgtttgtttgtttgttttttgagacggagtctcgctgtcgcccaggctggagtgcagtggcgtgatctcggctcactgcaggctccgccccctggggttcacgccattctcctgcctcagcctcccaagtagctgggactacaggcgcccgccacctcgccaagctaattttttgtatttttagtagagacggggtttcaccgtgttagccaggatggtctctatctcctgacctcgtgatccgcccgcctcggcctcccaaagtgctgggattgcaggtgtgagccaccgcgcccggcccatgaattggctttttaagaacagaagtcagacatagccccaagccagcctagggaagcttggtccatgtgtgagctcagaacccaaacattctcactcctgcttttcacctgtgtactttgagagggtcaggaggagacacaccctcttcagctttgtctacactgggtcaggaggagacacaccctcttcaggtttgtctacactggacatgagtgctagggagcaagtttgccattattgtcctccaaacccaagagcagcaaacacttatggagcacttgctgtgtaccaggcactatacaaagcaccttatattttcattgtactcctagraaacaggctcagtagctggatgttgagcaatcagctagtgatgctggagtggagacttgaacctatgtagtctggcttcagagtctatgctcttaagaagaaaaaaaagtctaccagaagggagcaaaaatagtaattcagggctgggcacggtggctcacrcctgtaatccaagcactttgggaggccaaggcgggcagatcacttgaggtcaggagtttgagaccagcctggccaacatggcaaaacctcatctctatgaaaaatataaaaaattagccgggtgtggtggaacatgtctgtggtcccagctacttgggaggctgaggtaggagaattgcttgagcccaggaggcggaggttggagtgagctgagtttgcactactacactccagctagggcaacagagcaagactctgtctcaaaaaaaaaaaagtyattcagggcagtctttccgttgcaaagccttttcacatgtgtgatgcaattttgtccttaggacccctgatgagtgcagtgttaccatccctctcttagaggtgaggaaaatgggccccagagagggacacgacctgcccagagccacccacctgactccaagcctggtgttcttctccctgcttctcagccgcctcctggggatactgttgtccagctggaatggtggcagccagcaggccagcagcagggaaccctgcgtgtcccacagcccccatgtgctgcctccagtgggtgagcagcatcctggcccatgccatggtttcctgcttccacccgaccctgatctcagcttagagccaccagttctcagagacagttgagtgatttttcaaactccattccttagaacccctgagggagctgggttcagggtcaggatatgagctcattgagtgcctaagtggcagctccacttacatctcttttgtattttgggttgctgtgtttagttttttaaataaaggactctatggaatgaaaaaaaatctgtttgcaaaccactgttcagatccagcaactacttccycattttayagatgaaaaatggayagcaaagctcattttttccccataaatgacaataatattcaggcattgttctaagtcttgttactcgttttatcttcacaagcctatgagggagacactgttgtcatctccattttacagatgaggacactgaggctcagatggtgaagtagcttgcccaaggattagaatccaaggagcctagctcccaagtccacaccctcagccgtctgcaacctgacagacatactatctctttgtatcctgaagagggatgctacttgctgaggcccagggtaaggcagtgttagaactgggaccgagatgtggatctccagcctcccagccctattcctgttccttctgctgtccaagacatcgcctgggctgaagagggaaccctggctctgtcattttctagctgtctgatcttggacaagtgaatggacttctctgagcctgttttctcaccttagaagagagataacagtacatcatgaggtcatcatgaaggttagacaggatcaaccacatgagttggctggcatggggttcatggatccaaggagtccccagagcttcctgccccacccacttcctcctccctctgcccagccctcacccacccactcacctgtgtaacacaaatactaattacaactgactccatgagctgcttcctggttgagcacaattactgggcagctcagtcatcaccattataccatatcattyaatgagacgggttaactttgtcttaagttgtacgtgattagatcagcacattgtcagagagcgcttggtctcttcagattgggacttccccagcctggtcatcacacagtccaggacatcacacaggagcacaggagcatgaggaggtgcaggggcatctgtgggtagccctggagtcaggaccagctgctttctggtctgctttgcagtttgtgcttggagaagatcagagtggacaactcagccccttaaacccagctgggaggtgacacctgaagtcgtaaggatggagcaggtgaggcagggtgggttagaaggaggtggtgattgccgtcttatctgatgtcatgggaaaacctgggttcaaatccaggctttgctgtttaccagatgtgtgacttagggtgagttactgatgctcgctgcactccagttgtttcacacttgcaaggagctgacatgtgccaccgagccccaggtctagtgcctggcacaccacgggtcttctctggtcgttccttccctcccatgtgctgcttctctgctaggcactgggctgaggcctttccgtggctcacttttttaagacgtgtaaggatcctttggggtcggcaccatgatcatctccattcacgtccgtggaaagatgtgaaagccaaagcataaaattgaagtgaaatgacttggtcagggccacacagccgcacttggctgctcttcactgtgttgggatgagatgccagaagcatgctgccgcggagcaccgaggaagggtcactgcgaagcccgagagagctgcctggaggaaagcgcgttaagctgaggagccagccggagaaagaaggcagactcgaactcctgagggagtcgggagggagggtttagcaagccaggccaaggttcatgggcttcatcctgccagctccagggagtctgtgtgtgaggcagttccacttgagaaagtcctgcccaggccaagcatggtgactcatgactgtaatcccatcactttaggaggctgaggccggaggatcgcttgagcccargagttagaacagcccgggcaatacaatgagaccttgtctctacaaaaaaaatgtttaaaattagctaggcatggtgctacccacctgtggtcccagctactcaggaagctgaggcaagagcatcacttgatcccatgagtttagaggctgcagtgagccatgatcacaccactgcactccagcctgggtgacagagcgagacctagtctcttaaaaaaaaaaacaacaacaacaagagccatggctcacatctgtaatcccagcactttgggaggcggaggtgggtggatcatctgaagtcaggagttcgagaccagcctggccaacgtggtgaaatcccatctctactaaaaatacaaaaattagccgggcatggtggcgggcgcctgtagtcccagctactcgggaggctgaggcaggagaattgaattgcttgaacccaggaggcagaggttacagtgagccaagattaagtgactgtactccagcctgggtgacagagtgagattctgtctcaaaaaaaaaaaaaaaraaagaaaaagaaaaaagaaagttctgccaggagcyagccaggagctgaaagactaaagggagctacagtaggagatcaagggggtcagggggtcaccggggaaggcatgccgaggggacagagcccagtgggcctggacagaggaccagagatgattgatggaggttgccaggcaagtggacagggtgggcaggtcagtggcctgtatcaggtaggagtgagaggctgctgaccaggtttggggcttgggcatggggtggcctccacagcaggcactgaagaatgggccagcaacactaggtaagattcccggtgccccccagggcctctggcagttgagtcaacactgggccatgtgagtgagtgcttcccagcgctgtgtgtgtggaggcaagtctcctgctgccagcacattcacgggagcccagccctgggactcggggccacgccagagtggttggctcacaggctggcagggctgctgccttctccaaggggcagttagcaaccttgacctcctacctctgccctgtgcccttggccttccagtgtctccctgagtctcaccttgaggcctccccagcccctgcccacctgctgccttcccctgcacaggccctcagttccatctgagcccttggtacaaaggggagtctccctctccaggccccagcagttatatctgtccctatttcccacatcccagatgggtggcccgtagcctctaaaggaagttagcctacagagccaggccccrggtaggaggcacaaaaaaaggaggtgaggccctgagataaccaggaagatctgggtttgggctccagctctggcaagctgcttcctttctctgagcctcagtctctgcatctgtaaaatggggatcccaggacttatcccacatggtgattgtaagacacaagagtaaaagagccttgagaactgggcaatgtcaaggtcaatgactctgttttgttttgttttactttattttattttatttctctctcttttttttgtagttgagacagggtcttgctctgtcacccaagctagagtgcagtggcgtgatctcagctcactgtagcctcaaccttctaggctcaagcaatccttccacctcagcctcctaagtagtggggccacaggtggatgccaccacacctagctaattttttttttaaattttttgtagagacaaagtctcactgtgttacccaggttggtcgcaaactgctgggctcaagcaatctgcccacctcgcctcccaaagtgctgggattacaagcatgagcacccggctgaagggtacatgatttctattaataactcgtatttgacttcttgctgttgatattaacctccatcacctgggcaatctgttattttcactgagtttacagcagggctagagtaacaacaaatgttggctgaacaaaggccaagactggaaaatctggatgagggcagaagcaaatgggaggggtggtgaggaagacaagaagaagcaagcagaaagaggtggcctgygcaggatgtccctctggtgtggttcacgcaggcttgggctgctggatgccaggcagttcatgttctagcttactcggtatttacaatggcccttttrcggatgaagaaactgagacctgagggtgaaaacaacatgtccgaggtcacatgagccaggaaacctgtgagtgggctcaggtctgtcttaattgcctgataaatgttgtttctaactctgttccacaaaggattcatgataggttataaataaaatacattcagtaaaacgacatgcaataccaaatggaaaatcagaatcacggaaaacagagtggaaaatgtggacaaggaaaaagctgaacctaaaggccaagaaagtgcccataggcgagtttctgatttggctatgagtttcctggcagccaaagaaaaaagagatacaagctgattcctgttattaaaaagtaaagaagcagtttacactttcaggaacttcatagtaaatttwaaaataagctaatcacatggaaatttctctggtgaaaaatactgggaaatataatggataatgtaataataataaatgtcaagtggcatatctttagaaatgatagccatatttttatatcttatcccttgcccaaagttgtgttacttgggtttgtttttgtttttgtttttttgagacagggttttgctgtgtttcccaggctggtcttgaactcctggcctcaaacaatcctccggcctgggtctccccaggtgctgggattgcaggcatgagtcaccatgcccagccaagcactttatctatattaactcatttaagtgtcaccacagtcctatgagggaggtactattgttatcatcatcctcctcatttgacagatgagtactgaggcacagagaggctgagtcacttgctcagggtcacagagttgggaagttcagactggggatctgaaatgaggtttagatccagagmttttacccactacattatagcatctgtgaaatataagtgtttagctaccagataatatgagtgtgttttagatgacatgtaaagattgaacagatcccagccaattaccagcaccaaaagtagtaactgatggggacttcggccacaaagggcagcrtctctaaggagctgaggcttagagacaatgtgaaagtagctgtggagggtgtggctcagtcccaggcctcagaatttcacatgtggggcttcccttttccacctcatcaccccaagatgacttaacaatcccccgcctttggccaaccaaacgcaagagccatatgagtgactaatgtcgtctgggcaaagggggtcatgcccaggtgctaccaggccaggaggcttttgtcgccagaaacctgtgcgtgtttatatttctcgtttctgctcaccacaggcctttgatttacaagggtggagtttccagagctgggcactgttgcaccttcatctggctgtcatcacttcctctgtgcagctggggcaccggggactgaggackgggcagtccacagggagctgtggttccaccccttcactcttggtttctgccaggccctcctcttgaacactagacccagattcaacccagatttctcctccacggctgcacagtgccaggaagggaactgagaagaccaaagtggaggttctttaccttccccaacacactcggggccaggcgtggcacccacaactgcaaatgagacaattagggagaataagtgctggctgccctgtcagcccagagcctcagtctgcccagggcacccagactctgtgaggttcccacctgaagaagcagttccatcttccacaaggagcacaggaccaagagtccaggacccaggttcgaggcccagctctaccactttctcgccgcggggctcgggttctctggaggcagcgtaatggagtcagtgggtttggcaaggggaagattcgcattatggctccctcagtctccaggcaggtgactcagggctggggggagktcctttctcctctctgacccttggtcatctcatttgtaaagcggaggtgatgattctcatctcagggacgaggcactgtggggttaggagagaatttgtcaagtggcatggttggtttttggtctgtctaggcccctccccctctctgtaagctggaagcgrtacttgtgaggctgaggctctaggtgggtgtggggagccattggggtagtgaatggaaggccctgggcgaagggccccaggcagctgttgaaatgtcactcacccactgtggacttcccaccaagcagagcccgccaagcctttcccgtctgaggtgggttcagtttcactaccgggctgaggcaggcatctcaggaaggggccctcggcttttgtgtgctgaaaaataaccaggctccatctctgctgatttctgcttgggagttccgtgagcttcctgcatcatctgtccacagacaggctgccgcagggtggacatcagagtccctggggtggcttccggcctccctcccttgcctcccgcctttgctcaaacatctgtagaggctccagccccagactaagcccttaaggagacagggtcccgtgagacccagcctctgccatcagggttctcctgtctaaaatgctgtgtgcctcagtaaaaggcagcatggggtagggtggctgtgtggggacacagagccagggaccaaatgctgtctggggtccctggagggtggtcaggagagcttgccagaagggggaaatctctgaaatgagacagaaggaggaggagccatcgcttaaccacacctgggcgagttaacttccccaagcctcagtttcattctctgtaaaaggaaccagtgatacctgcttctgagggaagggtgagaagcttaaaagagatggtataaaagaactgacaaatcccgtacaccagccgggtgaatcccttacaccacccacrtgccccggggagatgttctgtgaactgaacttctttttcaaaagtcttttcctctggcaatcgacacctggtaacgtagtgtaaccaagtgtcctgttctagaaaaagcccagctgcaacccagcagtaagtgaagcagcctcagagtcccctctctctctgggatgggtaatggaaactcctccacccagtgggagtgaggcagaagtctccagaattcagagctttcccatgcaccctgcctccccagggcctgtgacctttagatgtgttccctgtttctgtaggcattatgaagttagatgcaggagagttcttgagaacttgaaggcacttcccctctacttgtcccccctttgattttaacaaccgtttgttgagcacctactctgtgccgggtgatggagagtctctgttggacaggccagacaaggtcccagccccagtaaagctgtggattctggagagggacagagacagtgatgataaagacatggaaacaaaacagtctgcaacaagtactgtaaaggaaaacaaacaggatgctgtaacagagaatttgggggactgcttagggttcctgggacatttgaggagctggtaggctgagatctgaagttggagctgaccatgggaagagtagagaggaggaaaaaatgttccagatagagacaacagcagctacaaaggtcttgggggaagaagaaacttgtagaaactgaggagttgtgtgaggaggttggkgggggagggggcgctggcagcacaagatgagggcccagagtgggcaggggccatggggcctggtgaagggtttggatttcattccaggacagtggagggtttttaagcaagggagtggtaatatcagaatttttttttattttatttatttactcagacaagatcttgttgtgtcgtccacgctggagtgcagtggtgcaatcacagctcactgtagccgccacctcctggcttcaagcgattctcccacctaagcctcccaagtagctgggactacaggcgcataccaccacgtcctgctaattaaaaatatataatatataaatatatatatatatwttttctttttgtagagatggggtccgtgttgcccaggctggcctagaattagactcaagtgatctcctgcctcagcctcccaaagtgctgggattacaggtgtgaaccactgaacccagccagatttctgtggtttgtttgtttgagatggagtctcactctgtcacccaggctagagtacagtggcacaatctcagctcactgcaacctcgacctcctgggttcaagcgattcttctgcctcagcctcctgagtagctaggattacagatgcatgccaccaggcccagctgattttttgtatttttagtagagatggggtttcatcatgttggccaggctggtcttgaactcctgacctcaagtgatctacccaacttggcctcccaaagtgttgggattacaggcgcgagcgagccatggtgcctggcctcagccagatttcattttaaaggctcatcctggctgctgagggggctgtcagagggcaggagtggaagccaggagaccatctggagccattgccctcactgtccctgtgacgtcaggcccctcacccctctaaacctgtttattcacacatatgtgtgactgtgagaatcaaatttggaatgagcagaaatgcactttgcaaagctgaaaagtacgcataaatgcagggattcccgccttgctagaagcggagagtcctttggaaatctgctgggttagacctctckggggttcttggttgggacagtgctgggcctgagtccctaactgaacacctcatatccgagagagccccctttccctgcctagggttataggagagggctcaggggctggggaggggggcacctggctgaggctccgagtcttgagggggaagatgggaaagaagggtccccttcctggcttctgactccccctggagcaatggttctcttgtgttgcagggagggcgacacctttgagcacgggggtgaccaccggaccaccctgcagccatccaaatgcacacacacagctcctttcatcccgtgtcagggagttctctgaaattttctgaaactcattcacgaactctggcttaaaggcctctgagctagaaaggggaactgaaaggggacacctacctttwtaccccaccttttttgtctggtctttctagcattaaccccctagacacrcctaagggctgatgccggggggaacctgtcttgattgctctgggccamatcgagggcaccttcctgatacttttgttatctgccactggggacccggttgttgaagggggacttaagattttctcgaaggaggggtcactgtgagggcctttcctgcctgctaggggcttcagtttgggggcccccactcccgacctccggggaagggaggggtccccatctcccccgggcctctcgggtcttggggtctccccgggaggccggaggttgggaaccgggcgccggcgaaccgatcaggccccgcccgcgaaggtggtgcaacgcctggcccggcccatcccatcccggccacccgggcagcgggaccaggcgtctggggcacagcatgcggggcgtgtggccgcccccggtgtccgccctgctgtcggcgctgggggtgaggcgggcgcggcctggagggcgggggcgggaggcgggcgggacccctccccgcgcgggccgctccgtgggccggtctcggtctcgggtgtccaggccggggcggggcgcggcggcggcggcgccagggtcggggccgcttccccattcgggcgcgagagccatggaggcgctgagggagtccgtgctgcatttggccttgcagatgtcgacgtacaagcgggccacgctggacgaggaggacctggtggactcgctctccgagggcgacgcataccccaacggcctgcaggtaggcgccctccgctccctcccgaggtccaggcgccccgggcccgggcatgcgcgctgccgctgccgcgccccccgcccctacctaccccgcctcttcccctcccttcccctccctcgtcccggcatcsgggaggggccgcgcctccccgcagctggagctccgcgctgagaagccttccggagcccaccagtctcccctcacctgcccccgccatccctagagcctcccggccacctgcttctggggccacagcccaggtggcagagttgaaagcacccccgagacccgaactggtccagttccctttccacagaaggcacagtttgtgcatgtcccgggacttgcccaggccctttaccggcagagtctacggctgtttctgttttagcgtggaaagccctgcatccctggaacccactcccccagtccggggcaaactgggaaagttggtcaccttatccgggaggcagtaccaccctcttcctcttgccctcccaatacctgagtttcctggggccagaaacctgttctctgccccctctccctgccccttttccagcctactaaggaagtccaattcctcccctccccagggtctccgcccgtgggcatcccatctgcccactcctggggagggccccacccccgtccctgccttgtaacaggacattgagcaaggctgctttctgccctcccgtccctggggggctgcactgggacagttgtggccaagacctcagtgctggaggggtttggagccagccaggtgcgtgggaaggtgctggaaacgctgcggacaccctaggagacccagtgatctggctcttgagaagccagtgtagaaagaggagctggggcaccccaattctcggaggacttctgccaggtagaccaagggaagtatttgggagaatcttggggccacttggtgaactggcacacaactcttcccaaaggcgagcttaggatgaatggacgcttagttgccaggcccactccaytcagawacgcctcttagaagcgggaataatcctcccagcgcagggagacaccattgatggagttcctcctccagggtcacataggcccaggggacccaaactcacagtcccaagggctctacccactgggatgtgtggtacccctgcttaaccttcaggaacacccctgagacctgtagggattactgtccccacttacagatgtggaaactgaggctctgagaggkgcaaccactggccttcggtcaccgagctaaaaatccgagagcgacacgtcaaaccctgtctgtctcaaacctcttcccagtggactcttcttaagaggctgaagccagcaggaaattagatttctggggcaggtgcttttcccttctcaaatcaaaacagaatctaatcagcaatgtttttcagtctcatcttccacagaagggtctaaatatatcaacacaaaagcatttcagaattcacagcaaagtaataatgccatgttgctgttatcctcacagcagcctgtttggggtataacctttttcagatgaaatagcacatttctctggggagggcccccggccaagcaggaggagccccgtctctgaagccagcgacccgggtttgagttcttackccactcacgaccttgggctagtggcttaatctctttcagtggtgatggcctcactgtgaaatggatgttagagaaagtggatgtcatacatattatatgcagcctgctaggattattgttttatgacccatgaagtaagggctggcgtggccacattattgatgataaaggtgagggacaaagagaggttagagacattcctggggtcacgtcgctgttgtctatggttggagttagtgtcctgtccccaaatggatacattttccactttccttgcaggaaaaggcaaagaggttatgcaaggatttggggcatttttgtgggtacccagcttggcttgtgtggtgtygccacaacttccccaaagtgaacatgaagtagccagtgcttgcttttctgagtcaaggacccattcatctccatttatgaggcagagtattctattaattgaatgttttcaatcattgtttttttttttttccccagtgtaaaagctttatatgctcacttgggggagaaaaaaagatagtcaagtataaaaaggaattaaaaacggagcagtaatcctgccacttggagataacggtttctagtttttcacacttgtatgtatgtatttttaaacatagttgagctcactgtaaatacacaatgttatatcccgcatttttcattcagcatcttctacattgtcagaaacttccgaaacatgctgccattaaaaatcataacacctcatggtaccaacatataaaaatatatttattcaatccactgtagttggacacttaggcgcaactgctgtcactctgtgggtgacccatttttagcttttcagattattacctttgggccggttgctagcgacacaacttctctctcaactttatttatttatatttatttatttattttgagacagagtctctctctgttgtagaggctggagtgcagtggcgcgatctcagctcactgcaacctccgcctcccaggttcaagcaattctcctgcctcagcctccggagtagctgggattacaggcgcacgtcaccacgctcggctaatacttgtattttcagtagagacaaggttttgccatgttggccaggctggtctcgaactcctgccctcaggtgatctgcctgcctcggcctcccaaagtgctgggattgcaggcatgagccaccacatccagcctgtgctctcaattttagactttttaaaacagacccttcatcccaaatcttttctcttgatggacagctaaaaaataagctatttgatttttcaagattttgaagtccattcgttttaggaagtcccaagtgatcaacaccaataactaataaatgaacacttccatttttcagccaaacttgacacatttgttactttattacttgccacatttatttattttttattattggacctgctggccaatgttgaatttaaccagagcaaaattctacctgtacctcacctgaaagggtttttctttttcttttttttttttcttttttttgagacaaggtctcactctgttggccaggctggagtgcagtggcgcaatctgggcttactagcagccttgacctgtgattctctcacctcagcctcccaaatagctggaactacaggcatgtgccaccatgcctggctaattttttgtatttttagtagagatggggttttgccatgttgcccaggctggtctcgaactcctggcctcaagtgatcctcctgcctcagcctcccaaagggctgggattacagccaccgtgcctaacctgttctttttctttatcccatattttaggcacagattacttgcagtctactaaagtgagtcactctgaaccaagcacagaattcaaaggaagctggctctaacttggagccccagctctgtctctcctgcgctgtgagacytgaaagcaactcacttccacagctttctttgtaaaatggggttaatattattagcccacctctcagagctgttgcaaaggctcagtgggacagtatgagggaaagcattttggataatgcttagaaaatggatttggttattaggttattacaaggattattacagaaactcactatgagtgacatgatataataatatacatctaaatatgctagcttttgctctgaagcctcttgctctgccaaagccagctgcctgatcttcccacacctgaacatacaccattttcagcggcaggaagggatatagctgaagttacacctgcagcctgaactgaggagcagatggccatgtctaccaaaacctttgaaattcattcaattacttctaaaaatctttttttgttgttgttaagaaaaaaagaaaggtgagatattaaattcttagttatagttttctcatttttttcccaccttgcacagggctctcttctcttctcttttttttttttttttttgagacagagtcttgcttgttgtccaggctgtagtgcagtggcacaatctcagctcactgcaacctccacctcctgggttcaagcaattctcccacctcagcctccccagtagctgggattacaggcgtgcgccaccatgcgtgactaatttttgtatttttagtagagatggagttttaccatgttggccagcctggcctcaaactcccgacctcaggtgatccacctgcctcggccttccaaagtgctgggattgcaggcatgagccactgtgcccagccttttttttttttttttttttgaggcagggtcttgctctgttgcccaggctggagtgcagtggcgtgatcatggctcactgcagccttgaattcctgggctcaagcgatcctctcacattggcctcccagagtgctgggattacagatatgagccgtcatgcctggccaaagctgtctttccagggtgatttcagggacaagcccgctcaatactttaaaaagacatgtctgtttacctggagttgttatcaactctgtttgcctattatatagccttgaggtttgagagtctgagaagtcacacctgggacctcaatcagcctcctcattttagagatgggagactgaggcccagagactgcccagcaacacacagtgggatatttgacttctcagggttaccatctttctcccatgctgtggggagctgggtgttccttctgggaagcgatgaaagttggaaagtacttgtaaatattagcctttgattcttgctaagatgtgaggagtgccctcccctacawcrgatcatattttaagctgttaccagtcatttaaagtcaggcatctgggtggggtagcagacaaggctcaggcagagacaagaggacacaaggacttgagaattttgctctggactgaccccattgcctcagccagaaggccacctcatggaaactttactggaagaaacttccccaaactgactttggggaactttcggaggcagggttcctcgcaggctgggctgtcacagtcgacttgctctcaaaggcttactccagggagcctggtgcccctgccagcgctcccaggtggctgggtttctgggctgcagaggggtgggatccctgccagacccttgcccagaccactcccattgctgcttcgtgcagcccaggttgctgggttctgccttcccttccgacctgactctgaaaacctggcttcacctggctccccaccctttctgctcccggcttgtctcgtgggccccrggcagcaggccccatcctcacctgcagaacttgttcttgctgtaagcctaggtgagccaascactcacttctgtaaccaaatatgtgtcccggattagggctttgttcccttggctgtggaaaccctgggaactcctggctggatagcgctgctctttttcccttactctagctctctcgctctttctgtttctctggctctctcatttctttgtctcattctccacctctctcttttgagggcaccccctccttctcattctctttctgcctcccacgacaataagtaggaaattaagcccaccagcgagctgagcatctgcagtgattctgcatcttccaggcatcagcgctgcctcttagcggatggccatttcacagtcccctctcctgagatggactgggctgcctgccaccaatcctcctaccctccaagctgcttaggccagtctcccatgcttgacgggacctcatttccaaaagaaacgtaagaaaccagtcacatctccccatgctgtgacctcatctcacggatcccctccacagtcccatgaaggaggctgggcaggtgcgacagggatgcaaagaagagactcagccgagrccagcggccattggaagcagatcggtgccctgactcacggcccagccctttccattgcacccaggaattggccaccctgccctggagaggcctcctgatcctggcctagtacctctaggtgacttctcctgccccagggtgaggcatctggattcgttctgcctttagagacaaggcttatccagaaaccatgaggcccgtagccgatagtacaagtcaagcaaagaacaagacaaaggttaaaaactccattttcaaactccatttgccattcttgcctggaactatgaatttttaattcaattctggcttaattttaatttaattttgcagtgaacaccatctgtttagattcagcactttgcatcaaacagtgagggtcagctccacttcctgtggtaggtctgcggctgccagtcctggagacgtgggttkcctcactgttctctctcctctctccttgccttcatgccccgacttcctgggtttcttctggagctaacgctaatacctactcttaggaatgttgtgaagataggctgggtgcagtggttcacgcctgtaatcccagcactttgggaagctgaggcgggcagatcacctgaggtcgggagtttgagaccagcctggccaacatggtgaaaccctgtctctactaaaaatacaaaaattagcccggcgtggtggcggacacctgtaatcccagctactcgggacgctgaggcaggagaattgcttgaactcgggagacagaggttgcagtgaacagagacctctccactgcactccagcctgggcgacacagtgagactctgtctcaaaaaaaaaaaattcaaaaaaaggaatgttatgggccgggcgctgtggctcacgcctataattccagcattttgggaggccaaggcgggtggatcacgaggtcaggagattgattgagaccatcctggctaacacggtgaaaccccatctctactaaaaatacaaaaaattagccaggtgtggtggcatgtgcctgtagtcccagctacttgggaggctgaggcaggagaatctcttgaacccgggaggccaaggttgcaatgagccgagatggcggcactgcactccagcctgggtgagaaagcaagactccgtctcaaaaaaaaaaaaaaaaaaaaaataatgttgtgaagatagaattgcactatcaaaatagaattaatatgatcccaggcccttagcactcaagtatttatttgctgccattgttcttttttccctttcctatccctctgtttctttcatcttccccttctgttcctttcttctctcccttctctccgcagatggctttgctccttgctcttagctgtctccttgtcgcccacaccatgacatttccctgtacatttaaggtgaggttttcctgcatcccaagcctagtggctgcatcctttggctccctggagccagcaccaggcacaggggtacctcttttcttttcttttctttcttttttttttttttttcaagacagcgtctcactctgtcacccaggctggagtgcagtggcgtgatctctgctcattgcagcctccagctcccagtttcaagtgattctctcacctcagcctccccagtagctgggattacaggcatgagccaccatgcctggctaatttttatatttttagtagagacagggtttcaccatgttggccaggctggtctcaaactcccaacctcaggtgatccgcccacctcaccctcccaaggtgctgggattacagtcatgagccactgcgcctggcctcttttttacttttttgagatagggtcttgctctgttgcccaggctggagtgcaggggcacaatcatggcttactgcagcctcgaccttccgggctcaagcaatcctcccacctcagcctcccaagtagctgggactacaggtgcatgccaccatgcctagctaatttaatttaattttttttaagagatggggtctgactgtgttgcccaggctggtcttgaactcctgggctcaagccatcctcctgcctcagcctcccaaagtgttgagattataggcatgagccaccatgcctggctgatgggtacctcttaaaccaaggtctcatccaggtgcagtccagcactttgggaggctgaggcgggtggatcacgatgttaggagttcgagatcagcctgaccaacatggtgaaaccctgtctctactaaaaatacaaaaattagccrggcgtggtagcacatgcctgtaatctcagctactcaggagactgaggcaggagaatcgcttgaacccgggaggcagaggttgcagtgagccgagatcgtgccattgcactccagcctgggtaacagagggagactccatctcaaacaaaacaaaacaaaacaaaacaaaacactgtctcacggcctccttgtgccctgtgagctgagccatgataatggggacatgagaagcctaaaggaggaaggatgaaacaaattaggggcagcaggacacatacgtcagtgtccctaggcaaggcagtccctgcttcaagtccttgggacccctctgagtaccagagaccaaggtaaagtgtgtgagataactgattactctgaaaaagcactttataaacatttgagtacagtgtacatgttagcatcataccaggctgtctctctctgcaccaggccctcacagcctgaagttttaattcatggtctgaaactttcattgctcactttttcagaagagattcttgagggatttgagcgggcggcatccctcccactgcctgacccagctgcttcagtgtctgagcctcctgggcctccacggaagtgtctctaagccccaagatcctttgctcagttttgttttgttttgttttgttttgttttgttttccgagacggagtcttgctctgtcgcccaggctggagtgcagtggcgcaatctcagctcactgcaacctccgcctcccgggttcaagcgattctcctgcctcagcctcccgagtagctgggattacaggcgcctgtcaccactcctggctaatttttgtgttttttagtagagatggggtttctctatgttggccaggctggtcttgaactcctgacctcaggtgatcctcccacttcagccttttaaactgttgggactacaggcatgagccgccgtgcccggccccttttctcagttttggaacccagttttttttttyccacagaaagtgcttgtgttcctccatctctggtgcagcaattcccagtcatttcctgcccagtaaatacctaaccatggccacgtggcttctcagtacccttccctcaactgacccacttcagatccccgagtgccagggtgggactccctcagggctctgacccggcaccaggggcacccctcaggctgttggtggggccgttgcaggtcagagtctgagtctcctcatcttccctgacagcttcccctcttcctggcaagccttgctccctccaccctgcccttcccaaagggtaaatctaatcatgtcactccagtcctcaagaggaagtccaggctcttaacctggctttctgtgccccttaggatctaggccctcctctcctctccacttccattccttcttatctggccagctcctacttattctgactgacccaggccagacatcacccgttccaggaagccctccctgattgaacccctgcccaccccagtctgtttctttatctgcctccctgctgggctgtgtatttccagcatggccctgagttggtgctcagctgttagcacatgacayrgtgtcactgaacacgttaccccaccttcaggagacccttcctgtcttgtgggtgtgggttttgcaggaagcatctcttggaacagaggagaaccccaagctgccttgggtgtgagaggcctgggctgtcggcccccattgctgctggctggtgtgtccctcctcgggcagggagggccctgccacaccctgcacttcctctcattgtgcctcccttcctgtttagctagactgttaggctggagggatttttcctccctttcaggacstgaatggagctatttctccttgcatctctgccaacatctcccaggatccacctctgatccactggtgggctcgggcatcaacagctttgggttccaatcccagctgtccccattcagctgggtggtgagaagccagggtctcacctctctggacctcagtttcctcacttgtaaaaagaaaaataacaaggtggctcgcgtgtttttgcrtgggattatgagggtttaatgagctaaggatgtctgtgcttctgggaagtgtgagccatggctgtgtcacccttgtccctgaccccgctgatgtgggggctctgcagagagcccagctgggtactcactggatgcctgcaagtccaaacatcctgttcttttttgaactcctcactggagaaacagggaaaagctgtagttttttccttccactcatatcgagtgacacaaaaaaacaagcctgtcggggccgagctgcttgactctctgatgtttgggagcagatccgagcagctgagcagggtggctgttcctttcctggattagggctgaatctgtgggaaccagaccacccctgagacaggaggcagccctgatgcctctccagggcctgggcctgcagcggaaccccttcctccaagggaagcggggcccggggctcacgtcttccccrcccctcctgcctccttccctgcaggtgaacttccacagcccccggagtggccagaggtgctgggctgcacggacccaggtggagaagcggctggtggtgttggtggtacttctggcggcaggactggtggcctgcttggcagcactgggcatccagtaccagacaagtaggtgccttcgtgttgcatggtgggcttgactcactcctgcacccggctccgtcagctcgggcgaggggggcttccctgcttaagccggggcagggctctgaggctaaggagggagccaggcccaggggggtctgggtgctgagatagaccaagacccgggaagtgggcagcgtgggtgatataaaggtctcgcacttgagtccacatcctgtcccagcaacttactggctgtgtgacctyggacaagtcacttattccctcagcctgtgtcttctctaatttaaatgggaaaacagtacccaactgggggatgggtctgcggactagagataacatatgtcccatagctggtgcctcgtaggacttcttcaactytagctctgggtactgttgttgctagaatgtggggtaattacacacataggctgacattgtctgctatctctagttccaataaaataacaataatgccctctgtttactgaattatttcctcggaccaaatacccaaataccacacccctcgcttcagatgcaatctcatttcctcctggaggcagccctgtgaagtgtggttacttttggccccttttccatattaggaaactgaggcactgagatagagtgacttgctaatccartgcggaagttggaattcacccacaggctactgggctcaagcccaggctccacctccctttrtaatccaagtacgctccagagcgcattacacccccaggagagctgcccttccagatccagctgcccatcgtgttccttgatcggtgcctttgtcccactttgaatggtgatacaattgggccactctgatcctgctgtaggggtctgagactggttctctgtttccaactaagtggatctagccagctgcctcacacagagttgatgctcagtaaacacttaagaagtgcgaaggggtggatccaagttagaaataagaatggggaattagccaaagccagggcctctcagtcccctgtgccccaacatctrttcttctgatggcagatggttcacctagttgagcagcctctgggggctctgctcagcatcccacccactgactcggtcgctcaccccatgagagagattaggagctttcacaggatcttggaacatccactacaggctgtgtggagccttccctctgtgaagttgctggtctgtgagggtggccacgctgcgctggggtggggaggggactcaggggcctagaaaagagcagggccttcatctgagcattcttccatccctcctgggtaaggcacacagstattcattcattccacaaagataggttgtacttaagaaataattgcttgattagttaactataatggtttgtaggtgttttaccaaatgtgcctggctcagcaggtgcttaatgcatatttgactaattaatgactagttttcaggcccttaaccagatgtgcttagcatagtgcctgtgccataggtgtgcagatagtaaaatgaataaattaatgtttgaatgaacgaaggggtaggaaggaagatcaggctgggaacagcctttctctgctgagtgtatgtatattgtgtgatcgtgtcctggtgtgtgtgtgtgtgtgtttgtgcctcctctgctaacaggacacaagctcgtcatcctctcctgccactgccatgtcgcctcagcctaaatcagctctagttctgaaccccctcctggtcagtgtggaccctggccagcacgtctgcacagctcttggctcagagcagcgggagctggccagactccggcagccagtgttrccctgagactgcccctcggagctccaaagatatgtcttcaccagaaaccaggggggagtccccacgggccagctcctgatgatcagacccaaaacatttctgttgttattgcccagtggggccccttgggaggaatcctgcttctgcctctgttgtgtccctctctgggtctcagaagggttttctccagcctggacctgggagaggaacattcttcccctggagtggagctgggcagagtatcaggtgacccctgagccacctgggaaagcagtgaccaccccagatattaacagtaayctcattacccaggagcaggtgctggtgctggccacatytgagcaaacatcaggccagtcaaagcaaatctggccgggcgcagtagcttacgcctgtaatcccagcactttgggaggccgagatggacagatcacctgaggtcaagatgttcgagaccagcctgaccaacatggtgaaaccccgtctctactaaaaatacaaaaattagccaggsatggtggcgcacaactgtagtcccagctactcaggtggctgtgatggtgcacaccggctactcgagaggttraggcaggagaatcacttgaacctgggaggcagaggttgcagtgagccaagatggcaccactgcactccagcctgggcgacagagcgagactccgtctcaaaaaaaaaaaaaaaaaaagaawgcaaatctgatgattctgaaggccagcctctgggaatgtctggacacatagtacgtgtttacttaccttcctgctatgcttcctttccagaaacatgctggtgctttgcaaacagaggcagcaaaacaaacaatacattctccaagaacatattttaaagaaagcattctacacagttttgaggccaggctgtccagatgagtgtctgtaaattaaatctaggatctgtttctgctttctcaattgatcacgcatgtcccaacggaaagaaatgtttgctgcctctgcaggtggtgaacaagtgctgaataaggcctttcattcattcggttgttcattcaaaaacacgtattgaggccgggcgcagtggctcacgcctataatcctagccctttgggaggccgaggcgggtggatcacctgaggtcaagagttcaagaccagcctggccaacatggtgaaacctcgtgtctactaaaaatacaaaaattagccaggcgtggtgttggatgcctgtaatcctagctactcaggaggctgaggcaggagaattgcttgaatccaggaggcagaggttgcagcgagtcgagattatgccactgcactgggtgacagagcaaaaactctgtctcaaaaaaaaaaaaaaaaaaaaaaagcacgtattaaacagctgctagttgccaaacacagtactagacaatggaaatataaaaacgcataggatattggcctgccctgaagttcacattctagtaggagaaatgaacaaggagatggtcgtgacatagcacagtagcagagcaggcacccaggccgctgaggggcccagagagggaagggggtcgatgaaggtttccgtaggaagagggggccttagatgagggggcctggaaaccatgaggtcatcaaaatgcatgaagcacttcctgggccaggaatatttcatgaagtttctgcaaaccattaaatagttaaataatcaagccattgctccttaagcacctcgtaggtccctagcccaatgtccagcaaagtaggcacttagtgaagaactcaaatttctgagactgctttatttatttatttgagacagagtctcactcttgtcgcccaggctggaatgcagtggcgcgatcttggctcactgcaatctccgcctcccgggttcaaaagattctcctgcctcagcctcccaagtagctgggattacaggtgccccccatcatacctggctaatttttgtatttttagtagagacagagtttcaccatgttggccaggctggtctcgaactcctgacctcaggtgatccgcccacctcggcctcccagagtgctgggattacaggcatgagccaccgagcccggcctctgagactgacttctgggactagtttcttgttttgtttttaaacccaagtccctgtgtgataacagcaaaaacctttatcagttaattaatcagtctgtctctctctcacacacagacacatacacacagattctgatgcgtcttcccgcgttaggctcactctcagcctgtctcctgggcatctccaccagccaagatgttgtaaaattttccttcctgtggttcgatgtgtgaaaacaataggtattcttttccttctctaagtatggagttatatcgtaatactcaacaggctctttcaayctacatggaaattctttccctgccccataaagattctggtgccttccccgagtttgggagtggagcatgcaactgtgattaagatgatttgatttagagatatttaaaatggcaccatcacccccaccatttcctttctctgttttcatgtgtaatggctccataatttttttatggcacacctctcggctgtgaacaataatttttaattgttgtgtgattatctcaaagtcagatcaccctgattttcctgctgttgtgcagctgctctgagccctttgtcagccacccatctgaaggactatgtgtttgtcatcaaatgttactaattccacaaatgaacctctgcccactggccttatgttcctgagtgaggggaacactgcccatactagctcgtgcgttctttgctgctctctaaagactggcctgaaacttcagaccctgagacttgaggaagctgagcccccgtgcccagccatggccatcatcactgtgaaatctgtgaaattggtcctacctttcttcctaacttttagatggataaactgaggcatggagcgatgaggtcacttgcccaaagccccactggcaaacgtagaaagctggatttgaacccaggtctagtggcctccaaagcccaccctgcctcactgcctccctgtgtggtggggaaacggatctcagcagtcaggctgcaccagcccctcgtgtgactggcagagaggtggggaaggaaagcagaaaaacacagccttggcatggctggaccaagacaggcctgggcccagctctcagctctccgccctcccacatagctgggygaccttgttccgttcactccctcagtttcctctttaactagggacatgatgcctgcatctgatgacttgtaatgagttaaatgagatcctgaatgtgtgcaaagtgcccagtacacggccacgttcagtaaagtccctttggtcatcagcacagcctgggtaaacggacgatggggctgggcctgtgattctcgatcctgcacagtcagcttcatgttgctgcctcaggccaggcctctgcgtaggccacccaggctttgggtcctttgggagagctcagccgccaaccttgaggcagggctctggccctttcctcttgcctctggcaaaccagtctcctcgctcttatcccccaggattgagtgcaatggctcgatcttggctcactgtaacctccatctcccgggttcaaacgattcttctgcctctgcctcccaagtagytgtgattaagtcggcctcccaaagtgctgggattacaggcgtgagccacggcacctggcgtagcctttgggtttttgaggattccctgaggtcactcactctcctgcttgtacgtaggagtgatttttcctatttcctccttctatttctaataggctttcctccttcctatgtcctgtcatccatactgtctacatcacccttttggcacatagtaaatgttcagtttatttttgtagaaaggaggacagacatttctcctactgttccattttgatttatgtgtatatccccaactgaattgttagctcttggattaaaggactctgcctttttatgcccaataccccagtaccctacacacacacacacacacacacacacacacacacamgcacacacgcacgggcacacactttcacgcaggtgcacacatgcacacacacgcactccatactcagcagagaacctggaaggtagtcattatcttgctgaataaatgaatgcatgcgtgaatgaataaatttgttgagcatcaaggaataataaagagtcaatgaatatttatggaggagaaggttgattaagagaaacacctgggttctgggtaccttttagccacaggaagsattttagacagctgagtagaagtcttgtgttataagcggaaatcatttctctgtaggggtctagtgaccgtccagttccaaatctgtgtggtcagggccagggtgggacatgtggcccctgggccccaagcccccttctctgccctccctgcttcttccctgcctgcccttcactggcctcttgtccttaacccttccaggatccccctctgtgtgcctgagcgaagcttgtgtctcagtgaccagctccatcttgagctccatggaccccacagtggacccctgccatgacttcttcagctacgcctgtgggggctggatcaaggccaacccagtccctgatggccactcacgctgggggaccttcagcaacctctgggaacacaaccaagcaatcatcaagcacctcctcggtaagcatccagcatggagaccaataaatgggccacagcggggagctgtcagctggcccagccagcttcccagctgcgcctgcttaaaggaggagcttggcagaatgggccgggcacggtggctcacacctgtaatcccagcactttgagaggtcaaggtgggtggatcacttgaggccaggagttcaagaccagcctggccaacatggcaaaaccctgtctctactaaaaatacaaaaattagctaggcatggtggcgtgcgcctgtagtcccaactactygggaggctgaggcaggagaatcgcttgaaactgggaggcagaggttgcagtgagccgagatcgcgccactgcactccagcctgggcaacagagtgagactcttgtctaaaaaacaagaaaagaggagcctggcagaatggaagaccatagacttgggagtaggtgaagctgggttagaatgtctgccctcactcattgtatgatcctgagtaagtcacatatctctgaacctcagtttcttcatctgtaaaatgagactaataagacccaaggtacagagttttgagaactagagagcacatgtgtaaagcattagcatggtgtgtgtggcatgtagggtgtacacaagaactggtggctgtggtcgttacttttgtggcttcaagcttggcgtagcttttgactagtattgactgtgagttttgaaagttatgagcaaaagggatcgagactgaacacactagatcagattctaaggttgtgatccaatgaaagttctaacaacagcttatcagaggattagttattcagtrtaggygggaatcatccttagcctcacggtgatcgggcttgcacgataagccctctggtcagagttctctttgcacttcactaggccttgggcacctctagttcacccctgtgttgatggtttttcctcagattagagctccacgttgtcttgtttgcagctgtatccttagttaatgtttgttggattcccgtctgcccactgggctcctcccccartgtgaaatcatgacacctgtgctrtaccataaagctgcccaccttaaccctcccacagctgggaccatggctgtctccctctgctgctgtcccctgctccatcctgggaccctaaatgctgggagaggctgcattctgaaaagtcagtcaatttatccatcaacaacagaacctagatccgacaaatactgattgttttaaaaaactttaagatattcmaaggcaggtacaatagaagatacccaaaaggggacagatcttcttaaagggacacgaatcttaagagacaggaaatgattctaaatggacaattaacaatttaaggcaactgggtcttttagattacagggaaagtaggcaaaccaggtgaaggagacctttcctttctttcctgccccagccccacagagcagagccgccgctaggtaaaacacacccaccctttctcctggcctccgacagctcctgaagcagcagcagcagctgccttcagcctaacttcctgaggatgagcagggtggtgtgtatggaggtagggttgaagctcagtatgtccgaagcagcaaagccccagtctgagatgtccccctgcctgccttatgccaccaaagtgcctttgaaagggcatgcagcttttcattttagaaccagacacttaaaaggcaaatatgtctatcattgcaagactggaactcaaggacgacccttctccagtgcctaacatcacagctgggggcttggcagggcccatagtccaggtagtataacaaggtgggtcggttcctctgcttcagactcaccaggacctgggttcgaatctggactctgccacttactatgaggtcttgggtcaattacatcacctccctggcttgttttctcatgagtacagtgggaaccatgcctcctctgaattttgaaaattaaatgggaaatacatttaaatgtatttaaaccatgcctaggcttggcatgttgtggtggctgctgtttgtattgatgctactgttattcacccttgacctttgcacagcatttgacaggttacagagctgttttgtagacaccatcccacttgatcctgcagggtggaagctgggaaggtgttgctcactctgttggtagatgaggaaagcgagatccggagaggtcctcatgataggctagtgagtggcagagctgagacttgcttgatgcctggtcttgtgccctttcctctgtcccacaccacctccttcaggtacaagggacagrcattakctccctttccgcagtgcctgcaagaaccwgcagggggcgcagagcctgagggcctgaaggaaggagagacacggatgtccgccgtgcgctgtgcactgtaccakgctctttagagccactgcttccttaatcctcacaaccccagacttcggaattgttgttcccattttatagatgcagcaactgaggctcccagaggttaagtgactttgtcaaggatataccaccagtccaaaatggtgaggggctcactctctggggagcagttagcatttabaggggatggggcaggrcagtggacaggccctctagcttcccagtgaggcccagaatgggctcttgtgcattgtgtgggttctggtctgactggttctggggctggttctcactgggagaaccttaggtctgagccaagattgagtccatccccactgttcctgacaatcaagccgtgggtggggagctgcatccaatgggccatggaacaacccaaaatcatgcattcaaccctgaccccgaggccaaggtctggtgataccaggaggccagaccgcagagttctgaagtcaagcagtcctggtgtgctagctgcttatcactcgtgtggccttggacaagtgacctggcttctctcccacttagtttcattatctgtacagtagggataatgatgcctcctaacacatacagttactgtgagtattgacttgcctgggatggttcaaagtgctgagcactggaatacatcggaatactagcctggcacctagtaggtgctcgtcaaagcacagctgccctccttggtggtggtaggtgagttccaacccagacttcttacaaacaagctgtatgactgcagagaggtcacccagatttttaggtcctcggctcatcacctataaagtgggaactaactgaaactcagctcattagtagggatgctctaagggttaattgggtgggcaaagaacaaagtcattatttcttatttattagagaagcgctggtatgtggacccagttgtcaggaaggaggtgcagaatacagctatgacacactgagcatctcacttgtattatttcattgaattctcatagtaaactcatggagtaggctgcatttgcacattttacagatgagactcatgaatatgaaggaaatgtatttcctaggaaatggtgaggctgrgattagacccagagctgtgggacctcaaagcctgtattctttctctactcactctactgtcagattcagcagggagaggccctgggtcggcactgctggcrgggagagcagccgagaagtgtggttcgcctgcctcctttccccagcrgctgctccacwgagttctcagcccaggccagccaagccccagcccaggtccagtgaacacaggagctggggtcacccccatgtcatactgactaggggcttccccrgaagacatatcctggggtcctctccctcaaggctcagtcctcggaactagtctggaaatggcccctcacctgtgggcttgatacctgggactttgatacatggaaactcctgaagaggcagatggcaggtgagtgggtgacaaaaaaatgcaggagtgtgggccagtgcattcttgggcttaaggccaggctgggttcagcgtctccaagacaaaggggtcagccaacaggcgtcggaagggagccagagctgatgggcacgggaacaagccggagrtgcccaggccactctgacctgctgaggcgagggcttccctctaggcrgagaggggagaagggacatttagagtgccagtgtggattgtgtcagccgatccggcaagatagttattaccatctgcttgtgtgaccttgggcaagccatgcatttctctgccaggtgaattcatgctaggctcctcagaggcaatccaggcagttctgtagcaggtgggccgaactaggccaggtgccactgtggcatgacctggcagtctgccagctggggatgctgacctcagctgcaggacacacagatgcctcgcacctcactctgccactcccccaagtggccagcatgggctgtccttgtaggttttggggagatgagagtgggtggcctcacttcatcagaggaaggaagcagccaggcccttcagcccttagacttggccctgccttggactttccaactgtgcttgtagctcagattattctaccagctagagagcctacaccaccccctccaaagcctccragacttttctcaaacctgctgcctccattgtcttctgtggctaccaaagggcctctctaggcttgagctacaagtacactgtgtgcacctgtcctgtttgctttactgtattttatactgtaagatgaacgcatacaaaaaaatcaatgcgtgctcattgtgacaattcaagcaacacagattccataaagaaaaaactagcagtctgccttccagtctccctgggagatagacatacaatattccaatagcgttaaaygtgtccatgtcggtgatgtggcaattaatcatgtcaccctgtgacatcgctcgtatttttattttgacatattttcctaatacctgctgtctaattgagtttcatcttcctgcgcatattggaaggaagccatctatggacagcatctgcatcatgaatgctttctatccagtatggtgtctacaggagtgggtgctgccttcctgtttggggaatggttacgtggattgattgattcttagtctgtttgtgctattgtaacaaaataccacagactggatgatatggtttggstgtgtccccacccaaatctcatcctgaattgtagctccctcaattcccacattttgtggcaaggacccagtgggaggtcattgaatcacgggggcggctctttcccgtgctgttcttgtgatagtgaataagtctcacaagatcttatggttttaaaaatgggagttctcctgcacagcctctctctctctttgcctgttgccacccatgtaagacgtgacttgctcctccttgccttccaccacgatggtgaggcctccccagccacgtggaactggaagtccattaaacctctttcttttgtaaattgcccagtcttgggtatgtctgtatcarcagtgggaaaacagactaatacactggataatttgtaaacaacagaaatttatttctcactgttctggacgctgtgaagtccaagatcaaggcacgggcttgttcagtgtctgttaagggttgctctctgcttccaagatggcaccatgaactgtgtcttcacatggcatatgggactgaagaggggggaactggccccctcaagcccttttataagacactaatccattcatagagcagagccctcatgacctaaaggccccatctcttaaaactgctccttaaggattaagttccaacatgaattttggaggggacacagacattcaaataatagcattgactcaacgatgtgaggatgggagggagcgtccagggcttcttagggccagctgggctgcttcagcttcacctccggttttctgagccaacctgcaggaaaggacagggaagcagaaaaggcttaggctccagtcctggccacagccacttttgcgacctaggaygagttacccaacctcttacttgtaaatggagtgtgataacagccactgtggaatggtcaggacaagatgcacacacagccatgcctatgcccatctcagaggaagcagttcactttctcaggaaggcttagaagtccagcatgctacccrctagctctgccttgataggccagtttcttcacgcacctgggcctcattttccttgtctctgaaatgggatggtgatatccgcctcaggggaccagggtgaggttgtgacagcagcacagggcctgctgtagatgctgtgagyggtggcagtggtggaattatttttgttctgcagagcaaggcgtctcctttatcagcaccccttccccccagcacaggatggggctcctgaggcctgtgactgtctgaacggagtctagttttatctaaaacaaacactggtcctgccctggtgtggagtcagggccccacaggctcctggccagatggtcccactgcatcaagggaggccgcacgattcccagacacccctatcccagcagcatgtgggggattcccagacacccctatcccagcagcgcgtgggggattcccagacacccctatcccagcagcatrcgggggattcccagacacccctatcataccccacagctctgcctgcctgggcgttcatttcctccctgaggagtgatgtggagagggcattccaatgaaaactcccagaggaagaagcggccgatgaaatggtgctctgtcttcctctctgggactttggggtagggactgaggaagcttctggaactcggggcccctagaaggaagtacccaggcagtgtggagctctgttgtgtggccctaggctgccaaaagatcttcatagyacaaggaggccgcagaagtgctgctgtctccaaaatgtgtccccagcatagtgccaggagccacactgttgggtgttggcttcttctttgcctccatgaaatcttctgggaagtaaacatgagccaggggtgtcttaaaggagaccacagcatcaagccctggtcttgctgaactcagagtgacagccccgaaaggggacagtgccagcctggggctagtctgaaaaaagataccgagacgagcaccccttgagaggcaaggttgggggcctgaacgaggggctatggagggttggcacagtcctagagacctttttcttattcagaaaaaggtctgtgcctgatttcactttgttttgttttgtttgaaaccaagtctcgatctgtcgcccaggctggagtacagtggcgckatctcggctcactgcaacctccgccatctgggttcaagcgattctygtgcctcagcctgccgagtagctgggactacaagcacccgccaccacacccgrataacttttgtatttttagtagagacagggtttcaccaggttggccaggctggtctcaaactcctgacctcaagtgatccacccaccttggcctcccaaagtgctgggattacagacatgagccactcatttcactttgaagcccagtcacctcccgcaggctagagtgctacgtttctctgtcattcattcctttattcactcaccaattatgcatcagacactttctgtgtgccaggcattgcttggggctggggattatgtaggaataagacagtcttttcttgtggaagttacattccrgcagggaagacagacagtaaacaaataaatgactaaatacatgataggattgtaaagagaagggctcaaaaacatcaagtagggcatggggscagagagggaagaggcgattgtagctgcagcgatcaggaagggatgggctttctcagaagggatgtctgagcagatgcttgagttaaggagagaagagaccagccagccatggggaagagtgtggggcaggagctggagacaggtgggagcgcagaccccgtcacccagggtggcatttctcagcctgcagttrtcattacgcctccatgaaatgttaatgccacaggtactctggatgtctgttgctattcttagtctgtatacacagagtaaaaagcgtgagatgctttgtcctgcaagaataaattcctgggggcagtattgcccctgttggggatgcgtgatatagagccttctggccaatttcaggaattggggctgggtgcggtggctgacgcctgtaatcccagcactttgggaggccgagacaggcagaccayctgaggtcaggagtttgagaacagcctggccaacacagtgaaaccctgtctctactaaaaatacaaaaattagccgggcgtgatggaggatgcctgtaatcccagctactcgggaggctgaggcaggagaatcacttgaacccaggagacggaggttgcagtgagccaagwtcgtgccactgcactccagcctgggcgacagagcgagactcagtgtcaaaaamaaaaagsgsggggggaattggtatattccagtgcctatttggactaaaaggagttcaagacaaygcactctacagactccccagaccagggctccccttgggtgtctcatagaggcctcaaacttcgagtgtctggagctgagctttaggcagtagctgtgtgcactgaagctccttcctaagcctgcccctcatcctcaggctgcggttccccagtgtcagcagcttctcactcaggccaaagaaacttgactccattcttgactctcctttctctcatgttccaaatacttctcgcmcccttctctgccrccatcctggccaagcgcccacctttgctcacctggtcccctgcagcagcctcccgcctggcagcctcacttgggctcttgtcccctggagcctgcaggatagtaggtgctccctgagtgaggaggaaaaagaagaggtgggagagtgtgccgtgggttgtcccygtgggctcctggaaccagggggaggaagaggaaccgtaccttctaccagggctcctgccccagccagcattggcagtggggatactgatgacacacacagagggggcatgaacaccaactcctggcggggccccctcatcctgtccactcctgccccacctgcccgatttcctttaaaaaaaaaaagggaatcttggccaagcatggtggctcacgcctgtaatcccagcatttggggaggctgaagtgggcagatcacacgtcaagagattgagaccatcctggccaacatggtgaaacccagtctctactaaaaatacaaaaattagccaggcgtggtggtacacgcctgtagtcccagctactcgggaggctgaggcaggagaatcacttgaacccaggaggtggaggttgcagtgagccgagattgcgcccctgcgctccagcctagtgacagagcgagactctgtctcaaaaaaaaaaaaaawaaatataaaaaaaggaaaccttaggtgggcatcyggcctcatcaccctctcatcttccagatgtccttcctctccagaaagggacactgggctctgttcttgcagccaccacctgttgctaggggcctactaggtccctatccagggctggttctggggctgcagggaccactaagacatggaatggyggaggggcagcccaggcacagcccctgcttctactccacattgagttcatccttcagcccgaagctcaaacgaagcttccccggggccttgcttggcttccctggtctcctcccgccctccccttcaaggcstctgggatgttctcacagcgttcaccccgtgcgtaatcagatgctcccgcgagtccttggctgccgtttgcctcactcaccacgctgcatgcctcacgtggacaggcctccagttatgttgcccactgtcccccacacccggcctggcggttgccaggcaaaaggaactttgtaaacaatgtgggaaagcaagtgagcgtggcacccaggtggtgggggccaaaggaatggagtttgaacctggcctgtggcagcctctcagcgaaggagcaagggaggctgtgtctgaaggaggcattccttctccctcccggtgataatttggggcttgcagacaggtgttagggaagagggcctcggaactcgctgtgattagcacagccaggctgctcctgggagctgttctttaggcctcttatctttgtggccttgggggagggagatgccaggctcactcatgggccagagcacacagagtgccttccccagcgctggccctggcatttcagggctttggccggagccagatgtggagggtgagacgctgcatctgaggcctggggagcaatgacgattctcctgctttttcttccaagagcttcattgggagtgttgccataggaacgaggcccctgggaggggcgaggcactccccttttgctctccctgatcttctgtatcccagcttccccatttccgccctcccctcacagagtcctcttctcagagctgccgtggtgcctgggggacatgcaggtgtttccagcacttagcaacccagtagcccatggtctccagggctgtacgaaccctccatagcccctcgttcaggcccctgaccctgtctctcaaggggctctcttgtctctgtgtcttccttcagactagccccaagctggtcccgtccccctttcagggccatcaccctgasgtcagcaagaccggggctcgatgctctgatcagtgaargccatggtgctatttatggtgaggatcggggggcagggagctctcggggtgaggctgggaaagctgatgaaagactggccaggaagtgactcatgtcctttgctccaagtgactacgccagacagctttcttttctccaagcagtccgcctgccctttcaggcatccccgcttgtccccacactgtcctgtcctgctccgcgcaacccagtggcctctcccctcccttccacctggtgaacaacttcagctttcagaaccagctcaaatggaacgccctctggagayccctcttctccccacccctccgaaggkagtgacttttctctgtgttccatagccacgtgcgttgttcatagcactgtcgtgtcttgtggtcatttctttgagtttctgctgggtgccaggcacagggctgggctctgaattttataggcataaataagaccygctttctgtcccaaggagctcacggtctaatggtggacacaggtatgcagagcggtgagggcctttgggaatgaacatcttaggagagccttcatcaaaaagatgtccccgtagaggccttgaggttgagtakgattttaacagggtcccatgcagaagctccttggggacagggatgttttctcttgtgtcccacagcttacacagggcctagcatagagtaagcatctagtatctggtcagagggtggatggatacagttctgcyaggaaagtctttgtgaaggagctggggtttgagggatctttgaaggaggcaaaggaaggggcttcagggccagagagaaatgaacatgaaatgagggaatgtgtctggagcagtgagtttcccagaggaggcaagagggacagatggaattgaggggtttagagtatctggcatggcctggagcagggctctgagaagaaggctcatgcacagagccccagtatatagtgggtcccttgtggacctgagtggcaggaagcggtcatcttcaccaggtgcacccaccggagcattgcctttagcaggtggcatctggaccagggcactgaggtgagggagaagggaacagaatctccgggtgtctggggtaaggtctgagaagccactgcaggagggagatgctscttgctggagttggcaagggcggtggaaaacggccccaggagttggctgtaagcctggtgaacgtgcctagcccctccaaggaggaagcaaaaagtaaattcataatgaatgagccttttgagtttccatccaacttcagtctttatcacaagaaagatcatctggtatctgaaaaccaagaccggcctctgtcccatgcaccaggcaggggtgttcgtaccacacgttatccacaggggaagaacactgtcctgctggtgggcacrtgcggtcaacccggggacacgtctgtgaacccaactggcagagggagagaaacgtggtcgattctttttctttgcagtcagcaaaatttcgggagcgccttcagcttgccaggctctgtccaggggccctcacataytcacggtgacggcattcctcactgccactccgacaggcagatgtcagagctcctttgcagctgagaacaccaaggctccgaaaagagggactgccccaaagccacccagtgggcaagtggggccgcattgcaaactccactgtctgttgttccagaaaactccacrgccagcgtgagcgaggcagagagaaaggcgcaagtatactaccgtgcgtgcatgaacgagaccaggatcgaggagctcagggccaaacctctaatggagttgattgagagggtgagtgcctcgggctctccctccccaagccccggcccatgccacctgcccgccccctggcttccactccagccttctggtaccactggcccacctcatacgtccagccggtagcaccaagagaaagacagaaagagagagagcgagtgtgcgagagcacatgtgagtgtgagcacattgcgtagctgcgtgggtgggttgtctgtgcatgtgtttgtgtgagagtgtgtgtcagcatctgttgtagatgtctgtcatctgtctgtgtgtctctctgtgcatctgtgtgtgggatgggggccatgtttagagggaaaatattcctccacgttgctgctgttttttcctcaggggttatgtttgtgtgtgtggaggggtgtgtgcctgttccagaaagacccacagagagtcttggcccagaaccagagccctccccgtgagcagggacccaggccactctcctatacctgcttactcctgagcaggggaagacatctttcttgctttcttgggcacttcccagactctgaggcttcctggtgcagacagtaggtgtctgtggatgttttctgcctgcctcgtgttccctggacagccctgcctcttagcttggctccaggaaagcattgcagcrgggttggtggctgcatgcgctggggactatgctagtcccctcctctctggacaggtcccatgtgccaaaccagggaagaccagggagattttttaaaatcccaactttctcgggaggctgaggcaggaggatcacttgaagccaggagtttaagaccagcctgggcagcatagcaagaccccatctccaaaaaatttaaaaattagccaggtgtggtgatacacacctgtagtcatagctacttaggaggatgaggtgagacaatcacctgagcccaggaggtggaggctgcagtgagttgtgatggccccactgcacttcagcctgggaatcagagcaagactccatctcaaaaaaaatttttttwaaatcccaactttgagactaaagtagaccgtaatttaccaaccttcttaaacatgtggagccttttttatcccagaggcacaattgaatttatgttttgatrtaatcacattcayacaattcattatccaaaatataaaccgtgaaccgggaaaagtctctttcccattctcatcccagccacccagggagcggctggattcatgcctggctgcttggcttgtctaggataagcctttgctccatccatgggtctccagctcatgggtcggaaacccccgatgaagaccaatcctttcctttgctcttgaggctcagagaggtcaggcgactgctccagggtcacagagcaagtcagcggcagaaccagaattcacatstgggtctccccgccacctcatcacctccctgcctgctctccctccccacagctcgggggctggaacatcacaggtccctgggccaaggacaacttccaggacaccctgcaggtggtcaccgcccactaccgcacctcacccttcttctctgtctatgtcagtgccgattccaagaactccaacagcaacgtgatccaggtgagctagcttgaacctgcagcggtcgagggggcgggcacgacctcttcctgttttgagtttagcaggacctggggtgggagaggggcttgccctgggtgggacggcggtcttctagtttctgagcctgggttatttccagaggccccactggtgagatctttgcaggctrctggccttgcgtagatgggcactgcatacaggtgaaactttgggtgctgatgggtttccgtgggccccaagartgatgtcaactcctgggcacagctgaacccacatcctggtttccccctccttagcrtctgctctttgtaactcttcttggaatgggtttgaatccatctctccctgtcagagcatgccccagacagaggctcagcctgcccaggggagctccagcactggtctgccccaacctccaatgcagaagtgagaaacccaggctgggggtcctaaaagctgagttcccagcccatctctaccattcagtcactgtgtgaccttgggcaagtgcctcaacctctcagagctacagttaccttataaatcaaatggattgcaataacacctgtcctaggtatgccaagatgtggccatgggygccaatagtagcaagcagaatttgaccctcccctcctgcttggcaggcacttgaccagcactgtcttcttgaatccccattctagctctgaaggttaggttttattttccctatttacctgagaagaaacctgagaatcagaaaggttcagtaacttggccaagatcacacagcttttgagtgactcttaaccacctggaaagcgttggggagatagaggcactttgccgaggcaagtagctgtttaaaaaggagggtggctctgtccagcccttctgaggagcccaggagccctgcgggggggggccacgtggacaggcaggaatgtgtcatcccgtccctgagtgggcttctcagtgactgtagccagcagtcctgcttctccaagggcctgagctgggcctctgctgccatgtgccagccattcccaggkcaggaggccgtgcagtggatacacgcattgcaacacgaattccctctcatgcctgcttctcttgccaggtggaccagtctggcctgggcttgccctcgagagactattacctgaacaaaactgaaaacgagaaggtaagcgygcctctcccctcccagcctgcctcccagcacggtccytcctgctccgtgtccacacccacacctgtgcaggtctttgaagctagrggagcccaggggtgtcagtgacctgatgggtgaaacaggcagaccctggcaggggaggracacccctaggctggctgtgtcactcaggcatcatkgacacaaggggcaagagacaggtatcatttgtcctggttctagagagaggcagaggcagcaataacagctaccacaattcgcctggccctttatrcatcacctgtgaccctcccattaaccctgcagatactgaacttcatttgcctcatctgtcaaacaggaattagttttgtyttgccttttacagaagagggtatcaggctcagagatgctaagtgatctgctcaaggtcacatagccagtaaatgacgagcctgagattcacatccggatccacgtgctccgaagcccatggctctccctccccctggcctgcctcttgtgatgcctcttggggcgacctcacctggaactcattcatctgtcctttcatccttccgccggcatgtacttgaccaagcgcccacagagtgcctgatgctggggagatggtagcagacaagaccaccatagccttcgtcccacagggcctgtggtttggtcrgcgaggcggatattatttaactaagagaaagtgragctgagaaagtctaccgtggagacctaattcagatcttggaacacgggtggggggtggtcagaaaagatgcattctaagaatggaaagacagccccaggacaagccctggaagacagggaccagcccaggtggggacctgtgagacgagccaagactttgggctttctcctggaggctgtagggaagcagcagagagacacggccccgagatcattctcaatgctgtgtctcccacgggtgtcttcttcttttttttttgagacaaagtctctctctgccgcccaggctagagtgccatggcgcycratctgggctcactgcaacctcctcctcctgggttcaagtgattctcctgcctcagcctcctgagtagctgggattataggcacctcccactatgctcagctaatttttgtatttttagtagagacgggktttcgccatgttggccaggttggtctcaaactcctgaccttaggtgatccacmcacctcagcctcccaaagtgccaggattacaggcgtgagccaccacacctggccccacgggtgtcttgggggcactgtgcagccccctggctccctgtgccggacttggctggccaagccccccaccaactctcgtccagtggatagtgggggggcagccactgacagtttggggtatgggccctgcaggtgctgaccggatatctgaactacatggtccagctggggaarctgctkggcggcggggacgaggaggccatccggccccagatgcagcagatcttggactttgagacggcaytggccaacatcaccatcccacaggagaagcgccgtgatgaggagctcatctaccacaaagtgacggcagccgagctgcaggtaacttgagcgccrgctgctagggaggctgggatggcctccaggtttcagacagggccctggactgggggcttttatactcatttcatctrgtccttgaaactatgtgacaaaggaaggatggttgttatgcccagtccacagatggaaaaactgatgctcagaaaggtcaagttacctgctgaagggcacacagctagtaagtgactccaaaataggcgcctggccgacaccaggctgcttctctgtaattaatagtgtttacttggaggctcggggtcatgaccacaccagcttacattgacagcgcctttccagtctctccagcaccaagcacatcgaacttggttacagtgagcacttaataaatgcatggtgtggattctgtcattacttttcccttttctgagccagatcaaggtccggaggctcctaagtggcagaggagccagccgcagatkggctcactgtacaacagggcgttagatctgtgatgctctctgtcacccattggagaagcccaacgtccaagggctcagcctctgccaaaggctgccctctggtggctgcttggttcttgagggtccagagagaatagcttgctggttccttctttccagagcatcagctggcattgcagagggatcagcagaatggccaccaccgatcttgccrtttcttgacatcacccaggaatgcgtggccaggccttgcttctctgctgaggaggggctcccgcagagtgtcatctccctccttccttaccttgtgaccagccgaatttgacctgttgtccgttccttctactttcaggaagaacactagktccctgccctttaccctcctccagctgacaggtgtatatgggtccgtcttgggaccttgcgcttcatgtgcttcctggctagtgggggacaccagctagaaacaaccctgtctcattgctgagtgctttgggcaaaagcagcgggccctgggagccaggggtggggagaagtcagggaaggtgagtctaacgatagatgagcatttccaggccaactgggtgtcccaggcggagatgcaggccgtgctagggcccacgatcagggtcaggggagcctggcctcctgctggtgctggctgcccttcagctcccagagaaactggcctgaggctcagtggtgctgctcagaccaggatggagatcaacagctgctgttagataccatctggcactcttttcctgctctgaggccaggaggctgagggtgatgttgtttgtgcattataatttggtttgttccagccgatttctcakcctgaggggcccccgcagtgcctcagccccctaccgtggccatgatgccaactgtctgtgccaggaatagcggagaaggcacaggagccctgagcacatcagcccagcatggccaccargttccccccaggcatcctatcaccactgcttctgctctcttcttccaagcagaggaagaaaggcttttcctgcctcccagctgcacagctgccaaggtggggggagtttagcagactcagcagcttgtagtacacaagccctgggcttagattcagaggactgtaagccccttggagctctaagtgctgggattataagcatgagccaccacgcctggccaaacagcctctgtgttctaagtacccaaagttcaattaagatcttyaggaaatatatggattctctcgagtttttacagatatttctgattaaattctaatgtgaatttggctgccttccttgtaaaatgggcttggctcgttcactcaccccagctgtgtgccagaacacaaatgagacatagcccttgccctcacaagggactgtggttcctcttttttttttttttttttttttgagacaaagtcttgctctgtcgcccaggatggagtgcagtggcatgatctcagcttactgcaacctctgcctcccaggttcaagcgattctcctgcctcagcctcctgagtagctggaattacaggcaggcaccaccacgcccggctaatttttgtatttttagtagagtcggggtttcaccatgttggtcaggctggtctcgaactcctgacctcrtaatccacccgcctcggcgtcccaaagtgctgggattacaggcatgagccaccgcacctggcctgtggttctttttttttttttaatttgagacagagtctcgcgctctcgcccaggctggagtgcagtggcgccatctcggctctctgcaagctccacctcctgggttcacgccattctcccacctcagcctcccgagtagctgggactacaggcacccgccaccacgcccggctaatttttttgtatttttagtagagaccgggtttcaccgtgttagccaggatggtctcgatctcctgtcttcgtgagttgccygcctcggcctcccagagtgttgggattacaggcgtgagccaccgcgcccggcctgtggttcttaactttaagtcacagagtcctttgagaacagatcaaaaaccatggactatctcccagaataaatgggtatatatgcatatttttaaaattatgtctgacatttaaagacgtcctggccgggcatggtggctcaggcctgtaattccagcactttgggaggccgaggcaggtggatcacctgaggtcaggagttcaagaccagcctgaccaatatggtaaaaccccgtctctactaaaaatacaaaaattagccgggtgtggtggtgtgcgccggttgtcccagctactcggtaggctgaggcaggagaatcacttgaacccaggaggcggaggttgcattgagccaagatcacaccactgcactccagcttgggtgacagagcgagactccgtctcaaaaaaataaaataaaataaaataaaataaaataataaagaagtcctggccccctgaagcctgtgttctaagtaagaatctcttcctggcctgccacacagggttgttggagaataagttgaggtaaaggatgagagttcattcagtaaactcatttgcacaacccagtacaagcataacatattatattcatcattattgttactattcctttgttattagcgatgtcacccaggaacccagcactaaatcaatttgattcattctactctgggacagagaatgtcttgttccctggtgtctggaaatggggttttcttcccatactccaggtaacttagggaaaagcacgccaggtttcacagtgtggttctaggctagccctgctggggtacagaatgcttccaggctagtccccagcagagtctgaactcagagctgtgaatcagacactcttccattacttctgggggcctgaggaccttccccttcctttctaggaccctcaygccaaaggctgtttgggcctgagccccattttctaccccatttctccagctgagatgaagctcagaagcattcttctcttctctcccagtttcaaacctatttgaattggttggtttgtgacccacagtactccttggctgcaggtgtggaaaatggagctcactggtgtgccccagagggtgtgagtcacaagtgraatgtcctagtcagttaaaacagccgtctccatggagatggagctaggcacatgtgtttaagataggagttcactaaagcagccaggatggaaaatgtgaaaatcctggtattcaacacatcttatctgacagtcatgggaacttccctgcacagaacacctgctttccctaaagggccagggttgtgttgaagagtacacagggatttctcaccgtcttatatctgtaccttgatcagagagttccagttgtctgcagtttatggagctctcgtccactgtgtaaacactgacagtttgtaaacttgtcgattttcccaaggcctttgccaacaggtcatgcagtcaggtggctctaatggtggaaccctatttgaggatctcacaagcacagctccagtttttgtagtcacagaaatgttaaagattagcctcagaggttacctgcctgagggcctcctaccaggaggagggcagagaggacaaggtaaagagaaaagaaactcagggttattgggcaagcaggtataagaggcacagatctatcagctctgggaggggaggctgttttcccctttttagagaaagaacggaaaaaggctggaggtcccagagctggttcctcctggggatgstgatccaggtctgctcattcttagctcattcttagcccaagtggctcttcccagctcacctagctggcagggatgcactggagccccctggcccccaagtccgctgckcacatctcttaccagctcygcaggtattttaccatcagccacggtgggaagagttacccagaaactgagagccagttgttaactgttttgtttttgtttttgttttgagacagagcttcgccctgttgcccaggctggagtgcagtggcatgatcttggctcactgcagcctccgcctcccaggctcaagtgattctcatgcctcagcctcccaagtagctgggattacaggcgtgcaccaccacgcctggctaatttttttatacttttagcagagatagggtttcatcatgttggccaggctggtcttgaactcctggactcaggtgattctcctgtcttggcctcccaaagtgctgggatttacaggcatgagccaccgtgcccsgcgcagttgttaactgtttaccagcacgccactgccttcaggacctgccctcctcacaaattcacctgtcctttgaggtccttgttccccagcagctgagttgcccttttaaacccaaagagatgagtgaacctgggttttagacctccacagtggctagttaactatgtgacctcaggaaagtcaccttaccccatctgcaaattcagcatctctttttttttttgagactgagtctcgctctgtcrcccaggctggagtgcagtggcgcgatccccgctcactgcaagctctgcctcccgggttcatgccattctcctgcctcagcctcccgcgtagctgggactacaggcgtccaccataatgcccggctaattttttgtatttttagtagagatggggtttcaccctcttagtcaggatggtctccctttcctgacctcgtgatctgcccgcctcggcctcccaaagtgctggggttacaggcgtgagccaccgcgccyggcctcagcatctgttaagygggggtttatggctacctccctcacagagggtgtcatcagtatwtaccaacaggctatagactggtcttacattacagatcaattttactttattgattgatttttccatgtgaaggccatatgtggagcctctctcacctcctttgtcttgcattttgtcctttttcaagaaaacaaaagagaatttggaattggacaggcccaggaacatacatgggagaccttgaacaaagattgtaatggccaatattgatgagttgcttgctaaatgccagacatatccatctaagtgatcgacatgtacaggcatttttgctgtagcagtatatataattccaaaaaaccttgtgttctgtaaaatcgcacactaaaaatagcagtacgtgtggggaaaatagaacaagagcagaacaaaagttatgcaactttacttgaggatactgtgctaagcgaaataagccaatcacaaaaggacaaatactgcctgattctacttatatgaggtacctagaatagtcaagttcatagagacagaaagtagaatggtagtttccaggagtgggggttggggccagtgggaagttattgcctgatgggtagagtctcacatttgcaagatgaaatctgtggggccagacgcggtggcttatgcctgtaatcccctcactttgggaggccaagacgggtggatcaccagaggtcaggagttcgagaccagtctgaccaatatggtaaaaccccgtctctattaaaaaaaaaaaaaaaaaaattagccaaggtggtggcatgtgcctgtagtcccagctacttgggaggctgggacaggagaatcacttgaacccgggaggcggaggttgcaatgagctgagatcgcaccactgcactccagcgtgggcaacagagtgagactgtgtctcaaaacaaaataaataatttaaaaaagcaatctgtggctggatagtggtggtgatggtagcactgcagtgtgaatggactgaatgcccctgaactgtgctcttttttttctgaggcagggtttcactctgtcaaccaggctgaagtgtagtggtgtgatttcagctcactgcagcctcgacctcccaggctcaagcaattctcccacctgggactacaggctcagacctccatgcctagctaagttttaaatttttttttgtaaagatggggtgtcaccatgttgcccaggctggtcttgaactcctgggctcaagcgatctgcccacctcagtctcccaaagtgctgggattacaggcatgagtcactgctcctgtccttgaactgtgctcttaaacatggtgaagatggtgaattttatatgtattttaccacagcttttttttttttgagatggagtctcgctctgttgcccaggctggagtgcagtggcgtgatcttggctcactgtaacctctgcctccctggttcaagcgattctcctgcctcagcatcccgagtagctgggactacaggcatgtaccaccacgcccagctaatttttgtaattttggtagagacagggtttcaccatgttgtccaggctggtcttgaactcctgacctcaggtgatccactggcctcggccttccaaagggtaccacaattttttttaagttgcrcaactttgtaatcagaatcctaacaaaacaataattagaaacttgaggagtacctcagcatggctggaggctgccgtggggaaagcaccagctgggaaatgctagctrtggacaccaagaccctgcagataagacagggagctctggccaggtggggtggctcaaagtgctgttaatcccagccctttgggaggccgaggcaggcagatcatgaggtcaggagttcgagaccagcctgaccaacatggtgaaaccctgtctctactaaaaatacaaaaattagccaggagtggtggctcacacctgtaatcccagctactagggaggctgaggcaggagaatcgcttgaacctgggaggcggaggttgcagtgagctgagatcacgccactgcactagagcctagacatgagagcaagattccatctcaaaaaaaaaagaaaagaaaaagagagctctgaacaagcgcctttagggtcacagagaaagtgcaacctgctggaggctgagagttacaggkctggaaggcgcctctgtgaggagaggaagccccaggcgcgagcgctcattttcagtcatcttaaaatagagcagaccaggctgggtgcggtagctcatgcctataatcccagcactttgggaggctgaggcaggcgggtcacttgaggtcaggagttcaaggccagcctggccaagatggcaaaaccccatctctactaaaaatacraaaattaagtgggcatggtggtgggtgcctgttgtaatcccagctactcgggaagctgaaacaggagaatcacttgaaccctggaggcagaggttacagtgagccaagatggcaccactgcactccagcctggacaagagagtgagactccgtctcaaaaaaaaaaaaaaagtagagctgaccagcctgctgtgtgcattagctgagctgagggcttttcctttcttgctgaaagttaatgttcaacccttcccgatcccatgcctgagaaatatcaccttcggaccaatgcagctcagaagttatgctgctgtcttcctgaatttaccaatcatgtagaagttcactgatgttacttacagaatcccatgttgaatagaacaaacagcataagcttgttcagtcctcacaaataacccagtgaagtgggttctgttattatggtgatccccacttctcagacaagatactgaggcccagaaggatgcattaacttacccagggttacacagctagcaaggaagagagctagaagatgagcccaggcagtttggctgcagagtctacaagctcaactgtttcaggcctgtctaaagctcagtctcctcatccatgaagcagggataatagtacctactgcttggactcgcgtgaggaccaggtggaatcatatgcatcaatcatttgccacggctcctggcacacaggagacgcttgctgaatggtagcggcagctgctgcatcttctcattgcatcctcattccatttcaggttaaattttggtgttggactccttagaattctacctacagcatctctgacaaaagcccgccaggctccgcttgactctctgcccggtgcgctgtcagatggcgccaagcccaagctctttcctttgcttcctgtagaagcccgtcctagagccctgggctgtgaggaggagcagccccacaggrtcacactgtccttttcccttgcagaycttggcacccgccatcaactggttgccttttctcaacaccatcttctaccccgtggagatcaatgaatccgagcctattgtggtctatgacaaggaataccttgagcagatctccactctcatcaacaccacygacagatggtaagaggacccccagtggcctggggcacgcctctcacagacagccctcttcttgggcaggtgggcaggggtggggatgacagtctgactcaggagagtgggacctgggcrggsttttacgagaggcagcaggacatcctggttacaggcacaggtttaaatcccagcctctttcaaactaccagctttgtagccttgggcaaatttcgtaacctttcttaagttcattctcctccttcataaaatggtgatacaaatatcacctgtggccgggcatgaacgcccgtaattgcrggacttttgggagacagaggcaggaggatcccttgagtccctgcgtttsagaccagcctgggcaacatggcgagacggtgtctctacaaaaaataaaaaattagccagacatggtgtcgcgtgcctgtcacccagctccttgagagggaggctgaagtggaaggatctcttgagctcaggaggcagaggttgtagtgagctgtgattgcactgttgcactccagcgtgggagacagagtaaaaccctgtctcaaacaaaaaaacctagcacctaccatttagggctgttgtgagaatcaagtgaaacaatccatatgaggtgatttaatagagtgcctagcatatactgggactcagtaaatgttggctattatttttagttaatacttacgattttctttcttttcttttyttttttttttttttttgagatggagtctcactctgtcacccaggctggagtgcagtggcgcgatctcaactcactgcaacctctgcttcccaggtttaaatgattctcctgcctcagcctcccaaacagctgggattataggcgcctgccaccacaccggctaatgtttgtatttttagtagagatggggtttcaccatgtttgccaggctggtccccaactcctgacctcagttgatctgcctgcctcagcctcccaaagagctaggattacaggcataagccaccacacccagcaatacttataatttttaaaaaattttttgaaaactaccaaaaaaatagggaaaaaaatttatcgtatttaacttatttttttcctaactccccaaacttacttgttaaawtttttttaatgagatggggtctcactrtgttgcccaggctggtctcaaactcctggtctcaggcaatcctcccaccttggcctctcaaaatgctaagattacaggtgtgagccacctcaccaggctctgaaaaaattttaaatgactcctgttgatcttgtggtatgtgtgtgtgcatatgtagagagaaagcawgggggagggcaggagagaggagggaaagagagatcggttttctaatatgtggtctttttttcccattatcataactaaatgtctagtctccttttcccttgacctgtatcctgaacattttcccccttgtcatctcaaaacctctgcaaacatcatttttcatggttgcatagtactccgtcgtgtacaaatacagttctttacttcctccttctcattatcaggcattttggttgattctgattagaggttagatgttcactacagtctcaaggtgacttcttggcaacggtggcaacagctacagataggttccctgtgccctgcaggtggggcagtaggagctgtcatcatggaaagcttggcctggctgggctgagcttcttttcctgcccctgctattcttagcctctctggccttctggctggggcacctccaagctgtagaagtggtagtcacctctccagcccagccctgtagcatacaccattggggtgggtctccatgctggggcttcatagcttccagacacagagcagstaggcaacaagcatttattgagcacctgtggtatacaagtgactgcastcaacactgaagcgtttcctatggtagaagacccaggcttttcccttgaagagcttacattgcacgtgcttagggagcagtaacccaccaagcccccgcaggctggaaggggcctggggtcacaggccaagtttgagagccccctaggggccagcaggggaagggccgcaatcctccctgcctaggtgtccctgagcctctctggcctcctctcccygcagcctgctcaacaactacatgatctggaacctggtgcggaaaacaagctccttccttgaccagcgctttcaggacgccgatgagaagttcatggaagtcatgtacgggaccaagaaggtgagcytgctactgcgtatgcctgaatatgggctgagcgcctactttatgccaaggtgtctatgggagcacaggaagggacctcagccagctgggggtgggtagaagcttccggaaggagtgcttatgccaagtaaagggtaaagaggagtcctagccactcagccaatttatagcaaaaagtagttgccagtagtgatgatagrtgctccccttgaacaactcatgatcctcacaatgcctgtgaggtgagtactgttattagccccactttgcacaggggaccaccaatagtattacttcttccccggaaacgtaaaacacagaacagyacctggtccttagaagcaycacgcgactgttcagtgttattattttcctcccagtttgtattctgggaaaccccaggccaggtgggctctacctgccgttaaatgcccctgccaggagccctgagggtccattcttccaaaggcttcagggaccttccctgccctcccacaggggaacctacccccagtggaaagttccacagccacttccaccttctccccaaggaagtggctgtcaccctctcactcatgcagccgactaatggttactcattgaactcctgccatcgcgtgccaggctctaagcccagtacgggaatactgagacaggtgagctggggtctgtaccccgagagcccacaccggctgagggaggtgataggaaatgaccagttctcgtatgtgctgatgggatacatcacgctcgggccccagagagtggctggaagaggccccgctacagagcrgtagaggctggtgtgccaagctcacctggcacagcttccccaacccagacagcagctagcaagaccccaacaatcctccccagagaggaggcagagctgactccagctggaccccactcctgcagcccttcccagagtccaatccagatgaggattggcagagaatggcaggatgtgggctcctgcttcgagccctggaatgcatcctacacgtcctctctcccatccccatgcaaacctacctctggcaggaaggrgactgagggagaaggtagctgggaacaagccccatttctaaccagaggcacttccaagggcaccaccagaccttggccacaagaagcatactgccctgcagaggacaaagcgggagcagtgggttggctgccctgcctggccaacttgccttcctgctcctcctgcatctaccttggactggccctgggttagagatggggccaaagccaggattctgttccctgcagaacttggcctcccaggggacttcctacagagagatttgatcaggacccaggatgatggttccaaagatggtctgtgtgtggaacatacacccacatattctctcaccttcccaggttacagatgaggaaactgaggctcagggaggtgaagggactttcatagtcacccagcaagaaagcagcaagggcctggtgtggtggctcacgcctgtagtgctaacactttgagaggccgagacaggtggatcacctgagcccagcctggaaaacagcaagatcctgtctctgttttttttttttttttaatatatttatgtgtttattttaagaaaaaagaaagcagcaagcttgaatgaaaatcccagatctgatatttacaactttgaggcactttcagctactcacttacataatgatgataataaccaaagataccattattggatatctaccttttataggcattatgaattcctactaccgctgttatcctcttccattttacagatgatgaaatcgaggctcagtgagggaaagggacttgttcaaagttgcttataagtggagaggaggctctgaaatccagcctatctgattccatagccctgagctctgtaccactcagcctctgctctgcaggaaccaaaagttaaggtcaagcttccctgtggttgccaagggctgatatggaggaagagggatgaggaattattgtttaatgagtatagagtttcagatttgcaagataaaaaagttctgagccaggcgcagtggtgcatgtctgtagtcccagctaccctggaggctgaggcaggaggactgcttgagcccaggagtttaaggctgcagcgagctatcactgactgcaccactgcactccagcctgagcaacagagcaagaccccatcactttttaaaaaattaattaattagtcagtaatggagtgagcttccctgggccaccttcaaagcacagggtgctgcttgaatatggcacttggagcaagtggggcacagggaggcctcaagagaggcaagggcaagtgggaaccctgaagtgggagggtctgagcaggggtctctggataccccagggctgatgggtgaaggctgctgctcacctgtttcttaatctccagccctccccactccccaactgtgacagagtctgggcccaggccaggtccctcctccttgtgttcagcccaactcaaagccacctcctagctgtgtgaccttgggtagtccttacacctctctgagcctcagtttttttaatctgcaattggagatcactcctgacctcacctcacaggacttttgtgaatggccttcattcgggaaaaagcatagagcatgggaagcagtgtggtgtgtgcgtttgttcatcctggcagggagggagcctgctgtgaggaaacggcatggaatttggagtcagaagatccaagtttgaattgtttcttctaatcacaccttaggcagattgyctcactggggcaggggctcaatctcccatctgtagaaaggggtaacagatccctgccttgcttatccaagggccgcctaagattagacgaggggatccctgtgaagtctcttctgactgctcaagcgctgcatgcagccgtttctcatcagctatcacccatttgtgacttgagacttccagcagggaggaaggaaccccttgctgagtgctccttgtattacagtgaggaagaggttaaaaaaaaaattgcagccaggtcagggtggaggaggctgcctggctgctcttcatcttcccagacctgactcatagatctcctgcaagatgcaggcttcctgaccggtcagatcgatcagaccctcgctccttttggagattttctcaccatcctgtagtacttccaggacttcgtgacctgtaggcagagagcgtggcctctttgaaggaagacattggagccggactttctgagttcaaattccacctcaggccgggtgcggtggctcatgcctgtaatcccagcacttttgggaggccaaggctggtgggatcacctgaggccaggagttcaagaccaccctggccaacacggcaaaagcccgcctctactaaaactacaaaaaatagccaggtgtagtgacacacacctgtaatcccagctacatgggaggctgaggcaggagaattgcttgaacctaggaagcagaggttgcagtgagccggtatcacaccactgcactccaacctgatagacggagcaagactgcatctcaaaaaaaaaaaaaaaaacacctcaaccacttactccctgggtgatccctttggccaagtgatttaacctctctgtgccacagttttttatctgcaaaaagaaacagactgggtgcggtggctcacacctataatcctagcactttgggaggctgaggygggcagatcacctgatgtcaggagttcgagaccagactggccaacatggcgaaaccttgtgtctactaaaaatacaaaaattaccgggggtagtggtgggcacctgtaatcccagctactcgggaggctgaggcaggagaatcttactgtgagcagtatatgcagtagggcccgctctcactccactgctacacttcactgtgattactgctgtggatggtgcaattacatgtctgtttctctcactggatgttctgggcatttcagttgagacccaggartacaggctcactgttgattcatctctagcttcgaaagacctagcacagtcaggatgcagggcaactgctcacagaacgctggatgcgtaaatgaatgaaagctcgtgtgaaggaatgggtttatccagagaatctccagagaagacgacacataagaaagtctgtctgtgattcagccctcacagcctggagcctccacggagcttcaaattagagtccccctcgtcctgacatcctgtgtggtcggcctcggccagacacagaccatgtgtccagctttgggcttctcagccgagggagggtaggcgcrggagggagggaaaggctgagggcaaggcatccaaatggacacgtagttgggaaaactaaaaagaacatgggtaagaagaagagtggcccttcctttctttcttgcctagaaggaatttttgtagctaaggcataatttacatacaataaaaatgcagtgtacattaagtattcagttcagtgagtttttggtttggtttggttttgagacagagtcttattctgtcacccaggctggagtgctgtggtatgatctcagctcactgcaacctccatccccagggttcaagcgattcttgtgcctcagcctcccgagtagctggggttacaggkgcctaccaccrcacccggctaatttttgtatttttaatagagatggagtttcaccgtgttggccagggtggtctcgaactcctgacctcaggggatccacccacctcagccatccaaagtgctgggattacaggtgtgagccaccatcccggccttttttgtttgtttgttgtttgtttttgttttcaattgagacagtctcgctctgtcacccaggctggagtgcagtggcctgatcttggctcactgcaacctccgcctcccaggttacagctattctcctgcctcagccttctgagtagctgggattacaggcatrtgccaccacgcctggctaatttttgtatttttggtagaaacagggtttcaccatgttggccaggctggtcttgaactcctgacctcaagtgatccacttgcctcggcctcccgaagtgctgggattacaggcatgagccaccacacttggcctcaatgagtttgaccaatgaagtcacccatgtaaccatcaccacagtcaagatagagaatatccccttctgccttgggcatagcatgctaaaaaaaaaaaaaagaaagaaaaaaatgtataaaaaattttagaaagatagagaacattcccatcatccatttgtccagcgccctctgagcagcaggtaccctcatgcccctttcctgtcagcccccagcccccaaggctggtgcagctgggtgtggacggaattatacacgatgtgcctggctgcttttgctcagcttgagtctgtggaatttatccatgctgtcgtatatatcagtagctagttcattcctttttgttgccaagtagtatgttgctgtataaaaataccacattttgttgatccgtctgcctgctgatgggcattttggctgttgtcagtttagggccatgatgaatcagactgccctgagcgtgggtggttgttaaccacctgttctttggggttaagaggacatcacttcctctgtcgtacgagggatttatgtgagcagggccaccacacgtggtcatatatactgtccacagagggatgcctggccggggagtgactggggctgacattagcccagcacgcgtccctgggccatgcccaggaggttgcagcccacagacgcctatttccggtttgcacagaggggttgtatggactgttggggcttgtaggcaagaccaagaaagaatcaaggcattgcaatcccgcggtgagccaggtgtggtggctcacgcctgtaatctcagcactctgggaagtcaaggcaggtggatcacttgagcccaagagttctagaccagcctgggcaacatagtgggatgatgtctccacaaaaaaaaaaaaaaatttttaaatagaaaaaattagccaggcatagtggcctgcacctgttgtcccagctactcgggaggctaaggtgggaagatcacttgagcctgggaggtcgaggctgcagtgagctgtgtgatcgcaccactgcactccagcctaggtgacagagcgagaccctgccaaaaaaaaagaaaaaaagaaaaaagtcctgcggtgttgctgtggtgttctcatttgaggagatcttcaatggcattggagccctggccctggggcagttttttctgtgactcagggtagaccagtcactctccaccgctctttgcctccaggactcctgctcttcccaggaggcaggacgagatgggggtaggtaggagcataggatgtggagtcaggcacgtctcagttctcattccaacaacacttgtcactcgtggggcaccctgggccagcagctgctccgtgccgagtgtgtttccccatcagtcaaacggcttgtaagcccygagggtcattgaatggctcaacgggacrctatttgtgaagtcccagcacagagcctggcattcaggaaatggcagggggtgggagtgagggtatcagtggcctcttggtcyggwgactaaaataactttactgggtcggaaagctctccctgaacttccagaacaaagcatgggccccacatggtgctacctcccagcaagaaaggggttgggaaacaaagggctggggcccagcgagccccctgacttgtgttttccagacctgtcttcctcgctggaagttttgcgtgagtgacacagaaaacaacctgggctttgcgttgggccccatgtttgtcaaagcaaccttcgccgaggacagcaagagcatagtaagtgccttccccgtggacacaggctgtgaggtcacacttgttgtggcctgcacagacctgccagttcacactccagcccaccctgggcctttcctgctcctgggcaggggaccttagggccacagcctcaatgcagaggcttcacttcctcgagccctgggtaatgggagtctcacgagggcagctcttcagtgccaggcccttatctgcacgagctcatgtgatcctcccagcagcctgcaaggctgtgacagccatccccacctccaagggctgtgaacgacccagagagaatgttggcagaacagctctggcccagagggtgacatttttcttattttgtgggtgacaggtttgttctagacaggcagaggagtgccatggcagagcgccttggagacagcccggcctaagctcagatcctggcctcrccgctggtcgggtggcctgggacagttcttacatcatctgcaatgtggagacgggggcattcctcccacagagagagattaaatgagatgccacacactgggcaccggcatacaataagggttcagctaatgggagtggtcattttattgttamaatcttgatgacaaatagtattcattatgtagctgtcatctgcagccggaggtgagccaaccgcaattcaaatccattacagtgactggcctgtgagcagctgggcagggtctgagttggggtctgctggcccctctgctcttgttgccgcacagctctgccttccccttctctagaaccttcaactttccatcttcgagcttgtctgctcatgacattgtctccctcaagaacacctgtctatatccagcctgagcatggtatttccgaagctgctcctcggaayatgagtactctagatcttaaagcccgctccatcaaaaaggaatgctgtggtccaataargcaataaggctgggagaggctgtgtcttctcccctctctggaagaatcacggtgcctattattaccatattaaaggctctraaaagtaccacagcagagacttttccaaytttcccgaagctcatcctaagcttattggagcatggagccctgtgtgtggaaggccagtcctgtcttgcagggtgttcacgttaggagcgtggtttggaagcacagctgtggctccccttctcacccagcctgacgcttggaaaattgagtttaatctctggccatcattgttctgcacggggtgcctgttgcatttacctgagaccagtgcgcagaccttactgctgtgatgtgtatctcctcaggccaccgagatcatcctggagattaagaaggcatttgaggaaagcctgagcaccctgaagtggatggatgaggaaacccgaaaatcagccaaggaaaaggtgaggctggccaggcacttggagggggtgctgcggcgtccagcacagatagaggagggtgggggaaggagaggccggtttttttgtttgttttttgaggcagagtttcgttcttgttacccaggctggagtgctatggtgcgatcttggctcaccgcaacctccgcctcccgggttcaagcgattctcccacctcagcctcccgagcagctgggattacaggcgtgcgccaccacgctcggttaattttgtatttttagtagagatggggtttctccatgtgggtcaggttggtctcaaactcccgacctcaggtgatcsacccgccttggcctgccaaagcgctggcattataggcataagccaccgcgcccggtgaggccagttctgtccggcagcacagcctggatgctgtctcgccttcagcgggtgagcggtctaggcctagcaggattcggggtaggcctcaagcacatgattgcttggatgtctgtagaagacaaacctcgctgagtgtacggggaaaaggtgcaggaaaacgcagcacgtcccgtgggtcgggaaggctctggcaccctccagtgggatgggagtcagggaagacttcccttgggaaagtgacatttaaacagagacctaagggataagtagaagttttgcaagggggaaacctttccagaaaaagacatgaaagcccaaggcaggcagggcctggctctggttccccttggcccagactatgagcccagcacccaagttgctcaggctggcctggtcgatgttgccgggcwctcacttcctctgtctgtcctgtccaggccgatgccatctacaacatgataggataccccaacttcatcatggatcccaaggagctggacaaagtgtttaatgacgtgagtagctgctgccctgcccccttgcgttcctaaatgcccccttagaaaagggccgaggcagggctgggtccagatggggtgctagaggcagcatggttgycaaaacacacagggatgatgtggtgtggggcttgggtatgggtcaggcatgaggaagcctcttcttcttcttaatttggctcctgggtcagctggaggccctgcctccccatagccaccatccatcagcagtgcccaccagtcagtacagaacccgtgctgtgtgccccctggaagtggtcagctccatttaatatgtgggaaataatggaggaaacagaccccagaaggtgcagagagaattggtggccctcagacatcaggggtggggtatgaagtgggaaaacccccacaccacctcctccctccctggtcgtgcttccagttacctcctgtccctgcggccctcctccacctccccagaaacccggacctctgattttgactttgaaatgctaatgggaaagaagcagcttaaatccaggtgcatttttaagcttggtttgggcaatggaggtggttgatacatccctgcttattagaacttttggcaaatcactcagttaggtggattgtgcttctgcctcaaattatgaagttttatatcttcttgtgattgaaatacttgaattcaggtatttaagaaaaaattttttttgagacagggtctcattctgttgcccagactggagtgtagtggtgctatctcagctcactgcaacctccgcctcccaggctggctcatattcatgagccaccatgcccagcctgaattcaggcatttaaaaatctaataacctctcgtcatggttatatttagaacctaagactataaagactcattctgagatcatgagactcattctgctgccttttccttgagaatcatttaagatgctccagagtgtcatgacgcaagatccttgggcctctggaggcatcctgggcagagcccaggatccatgtcctgtccctgaggctccagcgtttcaccagaaccagggagaattttgcacctgtcaagagctgagccaggcgcagtggctcatgcttgtaatgccaacactttgggtggctgaggtggggggattgattgagctcaggagtttaagaccagcccgggcaacatagtgagacctcatctctacaaaaaatgtaaagattagctgggcatgttggcatgtgcctatagtcccagctacatgggaggctgagatgggaagatcacttatgctcaagaagacaaggctgcagcaagctgtgattgcaccactgcactccagcgtgggcgacagagcaagaccctgtctcaaaaaagcagaaaaaaagctagaaagctgggccgagtagtgaaaagggtgtacagtgatgcccttgacagttcagatagatttctactttacttatgagatctagtatggtagctactagccacaggtggctatttaaataattaaaacttaaattagtttaaattaaatttaaaagccacacttgccacatttgaaatgcttattagtggccgggcgtggtggctcacgcctgtaatcccagcactttgggatgccaaggtgggctgatcacctgaggtcaggagtttgaaaccagcctggccaatgtggtgaaaccccgtctttactaaaaatacaaaaaytagctgggcttggtggcatgcgcctgtaatcccagctactctgggaggctgaggcacgagaatcacttaaaccaggaggtggaggttgcagtgagccaagatcgtgccattgcactccagcctggatgatagatcaagattmccgtctcaaaaaaaaaagaaagaaagaaatgcttagtagtctgccatactggacagcgcaggcatagagcacagaacatccatcatcgcaggaggttctattggacaacatgggagatatttcttgcctgggcccaggcactgctgtaggcacatcctgcaacggtgtcattccatctcgtgccccagggtgaaggccaagagaagagctgaccctgcagccccaagccctgcattccggtctccagcctgsagwttaatctcttaaccatgacagcccttggcttcctgtcttggaagatgcacaccaccgagggcacactgtgattgactccacttcttcttttctagtacactgcagttccagacctctactttgaaaatgccatgcggtttttcaacttctcatggagggtcactgccgaycagctcaggaaagcccccaacagagatcagtgagttcccccaggccctgccggcaaggtgccagctccccacctgtgggcaagccttgggacgaactggccttcattgcaccctcactgtgcacccgatcagctatcamgagagccgtctgaagagtggatgcccttgttatcccacttttcagatgaagaaaccaagggcaaaagaagtatggcccagctaggagctgggatgggcttgagcctgcccagcctgttggcagggtgagcctggcctctggagcggagccgatctggcaccttgtctccgctccactgctttgggatttggagccttcatttcattttccgcagaataggatgggaggagctggttcttgggtcctcatggcagtcaaatgtgaggacctctggggagcgccagaccccaaggaggccccagcaagagcagctttcccattgttcctcactaccacgaatggtgggatctcaggacagggagcccacagaggcctggggaaggttctggatgggcttgacagctgtgcttcccaaagctcactgcacatcagagtcctctggggaactttttcaaagatacagcttcctggccgggcgtggtggctcacgcctgtaatcccagcactttgggagggcaagacaggtggatcacctgaacccaggagtttgagaccagccatggtcaacatggcaaaamcctgtctctactaaaaatacaaaaattaaccgggtgtggtggcgcacacctgtagtcccagctactcaggagtgagtagctgaggcacgagaattgcttgaacccgggaggcggaggttgcagtgagccgagatcgtgccactgcactccagtctgggtgacagagcaagactccatctcaaaaaaaaaaaaaaaatacagcttcctgaccttaaatcaggataacctagaatgagacctggtctttgtcctttttattactgtctcctcaggtcaatcacagtagctcaggcctgcaatcccagcactttgcaggctgaggtgggcagatcgcttgagcctaagacttcaagaccaggttgggcgacatagggagatgtggtctctacaaaaaatttttaaaattagctggacgtggtggcacgaacctgtagtcccagctactggggaggcagaggtgggaggatcactagagcccaggaggtcgaagctgcagtgagtcaagatcatgccactgtactccagcctgggcaacagagcgagaccctgcctgaaaaaaaagaaagaaagaaaaaaaaaaactgtctcctcaaaaaaattagatgtagtcagcccagttccagtcttcagtccaaggtccttccattcctcagtgcaaacatttgggataaatcttagggaagggtgcaatcaacttctctttgcctctggtgccccctggtggactataggggttcaaacatctctatttccttcatttccagcctccaaccaggacaccccgctatgtacaagaaggtgggcttttaccttcagaacatggcataggctctgttgccagtttatctgaagtattttaacttagcttgaatktttttatttaaatttccttgcctacccattgaagtatttgtgattatttgaatataaatatgatgttttaaattcctccatatggccaggtacagcggcccacgcctgtaattcgaacgctttgagaggccaaggtgggaggatctcttgagctcagaagtttgagaccagcctgggcaacatggtgaaaccccatctctacaaaaaatttaaaaaattagctggacgtggtagcatgcgcttgagcccaggaggttgaggttgcggtgagctacagttgtaccactgcactccagcctgggctacagagcaagaccctgtctctaaaataaataaatacataaatagagttcttggccaggtacgggggctcacaccggtaatcccagtactttgggaggccaaggcgggtagatcacttgaggtcaggagttcaagaccaatctggccaacatggtgaaatcccgtctctactaaatatacaaaaattagccacgcatggtggtagacacctgtaatcccagctacttgggagcctgaggcaggagaatcgcttgaacccgggaggcagaggttgcagtgaacagagattgcaccactgcactccagcctaggcaacagagtgagactccatctcaaaataaataaagttctcagtatgttcccatggctgtggggctcacctggaggaggcagagtgactgtctaggctcttagaggaaatgtggtacccatctcactgcactcctcactcacccttcccctctgtaccagagaagtcattgaaatgccaaatacctcatgactatataccattactttcaaaaccttttttggtcttgggatccttctacactcaaaaaaattattgctgggcgcggtggctcacgtctgtaatcccagcactttgggaggccaaggcgggtggatcacctgaggtcgggagttcaagaccagcctgaccaacatggagaaaccccatctctactaaacatacaaaattagccaggcatggtggcacatgcctgtaatcccagttactcaggaggctgaggcaggagaatcgcttgaacccgggaagcagacgttgcgggtgatccaagatggtgccattgccactgcactggccctgattttttttaaattttatggaaaataactattttcaaaaaattaatgagaagagaggtatcgttttactttttgcaaatttctttatgtctggcttaatcaaagacaactggattctcatatctgattctgcagtcaatctgttaccatatgttgtttttatatatagaaagaattcttggccaggcgtggtggctcacgcctgtaatcccagcactttgggaggctgaggcgggtggatcacgaggtcaggagttcaagacaagcattgccaagatggtgaaaccccatctctactaaaaatacaaaaaattagccagacgtggtggcgggtgcttgtaatcccagctactcaggtggctgaggcagagaattgcttgaaccctggaggcagaggttgcagtgagccaagatcacgccactgcaccccaattgccctccagcctgggtgacagaacaagactttgtttcaaaaaaaagagaattcttgcctcacataggaatttagttgggaaagggagggatgagggatattttaatagtcttttctggtacttgtgcacgttcttctgatactacaccaaaactcgaaaagtgataattttttaaaggttaattgcactatggaatctgaaaccacatccatgaactttatttttttcttttttctttttttcactgtatcacccaggccagagtgcagtggcataatctcagctcactgcagcctcaactttcccaggctcaggtgatcctcccacctcagccacctgagtagctgggactacaggtgcacaccaccacacctggctaatgtttgtattttttgtagagacaggtttcaccatgtcaccggggccggaatttttgtaatttttttttgcccaggctggtctcaaactcttgggctcaagcagtcctcccacctcggcctcccaaggtgctaggattacaggcatgagccaccatgcccagccttcatgaactttcatactctgttacactaaattccattggtctgtcctgcactttgaatggatcttttacccaggcgtgattttgtaacatcatgtcttagtcatttggaaaacaatggttcactgagtcttacagatcttccaaatggttatacttccaatatacaatagcaaaaaaatccacatttgttaatatcactgctgacctchtgagaaaaaccttycattattattggtaaggtgtcaaacttgtggtggccaatataagtttttcaaaattttaattttagcctgaaacttcaacatttttttaaatctcatatttttatcattggcaacagatggcttgagttgttttccttgaggtgataagctcactttattcattttaaagaaaatgtctgccagatgtccacgtctgaaattccatagtttaccagtcatcctaaaagtaccaacagggttccaggaaagaagcagaatgctttatatgtggatttaatgttactccacctctgtaacattaaaaaaaaaaaaattagccaggcatggtcacgagtgcttgtagtcccagctacttgagaggctgaggtgggaggatagcttgagcccaggagtttgaggctgtagggagccatgatcatgccaccgcactctaacctgggtgtcacaacaagatcttgtcgcttaaaaagaaaaaaaaaaaagtcttgtattcaggggttgagatgtaatgaaattaatcattatgacggcgcagtggctcatgcctgtaatcccaacactttgggaggccgaggcaggcggatcacgaggtcaggagatcgagaccatcctggctaacacggtgaaaccccatctctactaaaaatacaaaaaatcagccgggcaaggtggtgggcgcctgtagtcccagctacacgggaggctgaggcaggagaatggcgtgaaccccggggggcggaggctgcagtgagccgcagtcgcaccactgcactccagcctgggtgacagagtgagctccgtctcaaaaaaaaaaaaaaagatactcttcagtggtgacttttcaaaatctttttcttttcttttttcttttttttttgagatagccttgctctgtcacccaggctggagtgcagtggctcaatctcagctcactgcaacctccacctcccaggtttaagcaattctcgtgcctcagccacccacgtagctgggattacaagtgtgcgccaccacgcctggctaattttttttgtatttttagtagagacagggttttgccgtgttggccaggctggtcttgaactcctggcctcaagtaatccacccacctcagcctcccaaagtcctgggattacaagcatgagccactgtgtgctgatatttcaaaatctaatggcccttcctgctctttgtaagaacctcagtattccaccgtgtgatatgacatcattaattaactgattccttatttatagacagtcaggtgttttctagttttctcctaaaaagcagtcctgcacccaggcacagtggctcacgcctgtaattccagcactttgggagtccgaggcaggaggatggcttgaggcttagaagttgaggctgcagtcagccatgatcacacgactgcactccagcctaggcgacagaacgagaccctgtctcaaaacaaacagtccttctgtagatgtccttgtacttgtgtgcacttgggcctggggtcaaggagagtctgcatttttaatgcccttattcccgatccccaagcagcgctccaggcaggctgtccccacctgcctcccrccctgtgctgagacctcctgcatgtgtgttgcttgcaggtggagcatgaccccgcccatggtgaacgcctactactcgcccaccaagaatgagattgtgtttccggccgggatccwgcaggcaccattctacacacgctcctcacccaagtaggctgcctctggggcccctaccccaattcttttcccccagcccagccctggggcccatacgacctaagccagtctcaccatgtgatctttgccccagtgctycaggttgcagatgtcagagatgttgcagaggaagcaacatcctcacccactttccttccctccagtgagatctggaagccctgcacagtggggtattgggagcatctcatggaatcaagagccctacctcagggaaacgcccctctgacaatgttataacacagtcagagctggggagtggggagrgttaaggctgctgtctcagtttgaatcccaggtctgctattggatgattgtgtggtccttgggcaaagcaattgacccattcccagccttggtctactcataaatagagctggtcaatggcgaccattgctaacgctttcgcaatgactgaagaggacagttaggtctgtagagcatctagcacagcgcatggtgcccartaggcacagctgaccacacagactgtgcccagcctccctctggcttcaggggccttgctggagactcaggccatgaccacacccttatccacacagagccctgtggaattttgctatatctctaagcccaggaagtgagggtcacatacctgagcaagagtgagaggccctcctctcaaagcatcatctctacctttgtgtctttccctmcagggccttaaactttggtggcataggtgtcgtcgtgggccatgagctgactcatgcttttgatgatcaaggtacgaattccagctgggcacgatggctcatgcctgtaatctccgtgctttaagaggaggattgcttgagggcaggagtttgagaccagcctgggcaacatagcaagacctccatctctactaaaaaaaaaattaggctgtgcatgatggattatgcctgtaatcccagcgctgtgagaggccaaggctggtggatcacctgaggtcaggagttcgagatcagcctggccaacatggcgaaaccctgtctactaaaaataaaaaaattacccgggcatggtggcgggtgcctgtaatcccagctactcaggaggctgaggcaggaaaatcgtttgaatctgggaggyggaggttgcagtgagctgagattgcgccactgcagtccagcctgggtgacagagcgagactccatctcaaaaaataaaataaaataaaattgtatctactaagaaagtaaaaatttagccaggtrtggtggcaaaattttaatagtcctagctacttgggaggctgaggtgggaggctcacttgagcccatgagtttgaggctacagtgaactatgattatgattgcaccactgcctggtacaggttccttggtcccctttagactgggccaatcatcttccaggccccactgcctctgctttctgcatccttcacttctaagggtcttagctttggaggcagaaggatctgggttcaaatccttgctctgccacctgccgattatatgaagtttagcaagcgctgtcatttctccaggcccccatgtcttgtctgtaaaaggagcgtgatggttccaccctcccgtggtgattgggaggactgtgtgaagtgtgtagtgaggtgccctgctcgtggaagttgtcccgctcttggggttcctattaggtttagcagagagtggacattcctccaccactccagagacttctccagtccaactgcagtcagggggcgttgaatcagtccctcctctccaactaatgtccaaaatcctcctcattgcctccttccttgggcactcccgggcggagatggaagaagcagagacctgggtggcctgggcctgtcttgtgatcctaggtcagctggctccatctgcctcttcctaggcatctgttactcagggtcaggggcccttagccagtgttgaaaataagccaggcacggtgacgcacacctgtaatcccagcactttgggaggctgaggtgggcagatcacttgaggtcaggagttcaagaccagcctggccaacatggtgagaccccatctctactaaaaaaaaaaacagaaatcagctaggcatggcggcatgtgcctgtaatcccagctactccagaggctgagcacaagaattccttgaacccaggaggcaaaggttgcagtgagctgagattgcgccactgcactccagcctgrgtggcagagtgagactgtctcaaaaaaaaaaaaaaaagaaagaaaacaaagcaagccccactgagcctcgggccacrctggagcttttcccgatttctctccttcatcctctcccgcctctgactggccaccacatccacgtccctcggcactcacagggacctcgtctccccatggtggctggaggacgggggtggacggatgaaccgcttctcaccaggagcagggaggagcagcaggtccctgctgtgcccctccctcccttgacatgacgcctccctctgacccacaggacgggagtatgacaaggacgggaacctccggccatggtggaagaactcatccgtggaggccttcaagcgtcagaccgagtgcatggtagagcagtacagcaactacagcgtgaacggggagccggtgaacgggcggcacaccctgggggagaacatcgccgacaacgggggtctcaaggcggcctatcgggtgagagccccgctccccacacgcrcacggtcccagtgctggctccttccagatgcctgtccgtrgaggatcatcacggacaaccagggcaggcgcagcagccgtgcgagcttcygtttcctcttctgygaaattgggggtggcgaggaccaatcgcgatgccgaccgtggaggctcccccaccacagggctkggcaccagaaggctttgtgctctgagtctggcctgacaaagacacaggaaggggctcgggcttcatccgcctgaagagcctgcctgttctcayctctgcaggggaagctaccaccaagtcagccagctgtgggtctgggaggcccctgaggactaagcagccagggcaaggagcactggtcgtggagccagttctgggttcaagtcccrgttctggagtaagtcacagaacctccttgagcctcacttgacttggctctgattagctactacctgcattattgggttgttgggaagataaaacaagatgatttagacacgggctgacccagagagacactcagagatgctcgcggagtcagatgggagagttagtaacagaggccacgagagaaaaacagtaggtgtctgtcagagagattaagacagggcttcctcccaaccacggcagtaagagcagaaatccatagagctgtcatttattgaggccttcttaagtgccaggcttggagtattcccagcagctttacaattaggtattataatccccgttttgcagataagcacactgagcccagaaaccttggataggttgcttaaagtccacgagtcaatgaaaggtattgagaatctacctagcaggggctgtgtttgaagctcatcctgctctctaaaagcttatactcttagtggaggctggaaggggaagaaaggcaaataaatacatcataaatctgtaagataatgtcagctattgaaaaggtgacgaatataaactggggcgaagtaatgaggaataacggggggtaaaaggaataatggggaggacgctggccacggcaggccttctctggggttatgacatttgcatagagacctaaatgatgaggaagagcctgggaaaagctggggaaaatggtctcagcaagaggaagagcaagtgcagaggccacgaactagacacaagcctggcacgtccaaggatgggaagaagggcagggcagagtgtagggaatgcggggaccagaccactccaggcttctgtcggctgcggctaaggaaggacctttggttttgtcctggttatgatagagagacacaatatagggttttaaaatagaggaatgacatgattcaacctaccctttaaaacaggggtcagccgggcgcagtggctcatgcctataatcccagcactttgggaggccgaggtgggcggatcatttgaggccaggagttcaagtccagcttggccaacatggtgaaacctcatctctactaaaaatataaaaatggctgggcacggtggctcatgcctgtaatcccagcaccttgggaggccttggtgggtggatcacgatgtcaggagttcaagaccagcctgcccaagatagtgaaaccccgtctctactaaaaatacaaagattagccaggcgtggtggcaggcgccagtaatcccagctactcgggaggccgaggcagggaattgcttgaacccggaaggtggaggttgcaatgagccaagttcgcgccactgcactccagcctgggcaacagagcaaggctccatctcagaaatatgtacatatttatatataaaaaatagccaagtgtggtgacgcatgcctgtaatcctagctacttgggaggctgaggcatgagaatcttttaaacccaggaggcagaggttgcagtgagccaagattgtgccactgcactccagtctgggtgacagagcgagactctgtttcaaaaaaataaataaataaaaataaaacaagagtcctctgggtgccgtggctcatgcttgtaatcccagcactttgggaggccagggtaggtggatcacaagctcgacttcaagaccagcctgggcaacgtggtgaaaccccgtctctaccaaaaatacaaaaaaattagctgggcatggtggcgtgcatctgtggttccagttactcaggaggctgaggtgggaggatcgcttgagcctaggaggtggaggttgcagagagccaagattgtgccagtgcactccagcctgggtgacagtaagaccctgtctccaaaaaaaacaaaaacaaaaacgagtcagcacacctacagcccatgggccgaatctagctgtgaggctgtttttgtaaatgaagtttcttggcgttgcagctggctccatttgtttccatgtctgtggcttttttttttttttttttttttttgagacagggtctcactctgtcacccaggctggagtgcagtggcgcaatctcggctcactgcaacctctgccttcctggttcaagtgattctcctgcctcagcctcctgagtagctgggattacagtcatgtgccaccgcacctcggctaatttttgtatttttagtagagatggggtttcaccatgttggccaggctggtctcaaactcctaacctcaggtgatccacctgcctgggccttccaaagtgctgggattacaggtgtcagtcatcgcacccggccatgtggctgctttcatgctgcaatagcagaattgagtcattgcagcggtgaccattagcccacaaatcccaatgtgctcactctctggccatccacagaaaaggtttgccagcacctgcttcctaaggttcactgaagttgctttgccaggaggggaatggaattgaatcagcctgagtcagaagactgattagaaagctgttgtgaggttgtccaggcaagagacagggtagagcaatgggaagggggagcggagcagtggtcagtgtttgatctgagagaaagagaagaattgaagaagcgttctgggtttggggcctgggatgatggatggtggtaccattgactatgatgggaaaagttgtgtgtatgtgtgtgtgtgtgcatgcacacacacgatgtggctctgtttataccatgttaagtttgagatgcatcttggctgtccagctggcacagttgaatatacacatcagggaagaggctggagcagaaggtgtaaatgtgagagccatcagtgcgtagaaggtattttaagccatagggctaaacgagtgcacatcaagaagagggctcccctaggctgagcccaggcccagatccccagaaactagtccttgccccaacacgggggagctccctgagacctccataccagtcccctccttcaccacctgccatgggaacccctgagctttggttttctctcctcccaggcttaccagaactgggtgaagaagaacggggctgagcactcgctccccaccctgggcctcaccaataaccagctcttcttcctgggctttgcacaggtgagtccattaggaaaacatgccacacatggtacattctgccatcttgatgtttcaagagcccagagagccgaaaggcaagttccccacagattgagaacttcccaagtcactggactgtgcacagcacatgtgccctgtcattagagagatgcacggaagggcccaaagyaccagtgaagggattcctggatctggtgaatgagaagacgaggtgatcacccagggcccttctggttctagggttctagaggtttcttaaacttaagatgaccagccaggcacagcagcccacgcctataatcccagcactttgggcggccgaggcaagtggatcacctgaggtcaggagtttgagaccagcctagtccacatagtgaaaccctgtctctatgaaaaaatacaaaaaaaaagtcaggcatggtggtggctgcctgtagtcccagcttcttgggaggctgaggcatgagaatcacttgaacctgggaggcagaggttgcagtgaaccaagatcacgccactgcactccagccygggcaacatagcaagattctgtcttgctgtgatcatcccagatcatcccttcagtcggcattcatctggtagccttctgctggcactcagagctaccaggccattagacaatttgttctgcccaggaaatgagagatctggactaaatccaagcttttccaactggtgtttggacacagtcctttgttcagatggaatcgaatgcagttgcctcagagatgctgcgctggctgaaggagaacagtttggagacaactgcgttagaggctgctggcatggggggtggcacaccagccctacaccagcccactgtctcttcctgacccgctcaggggaccctcctgactccccgggatctcaggatcaggtggggggcttatctccctggtgttgtattttctgggttttgtttttttggagccggagtctccctcagtcacccggcctggagtgcaatggtgtgatcttggctcactgcaacctcaacctcccgggttcaagtgattctcctgcctcatcctctcatgtagctgggatataggcacgcaccaccacgcccatctaatttttgtatttttagtagagacagggtttcaccatgtttgtcaggccggtctcgaactcctggyctcaagtgatccaccgccaccttggcctcttaaagtgctgggattacaggtatgagccaccacacccaaccttgttttgctttttgagacaggatctcactctatcaccgaggctggaatgcagtggcacaatcacagctcactgcagccttgacttctccagctccagtgatcctcccacctcagcctccccaggagctgggaccataggtgtacaccaccatccctggttaattttttttttaattttttgtagagatggggtcttgccatgttgcccaagctggtcatgaactcctgggctcaagcagcccttccaccttggctcccaaagtgctgggattacaggtgtgagccaccgcacctggcctcccctgctgttataatgggggcagtctggcagcccgagggccccacagtgaccctggcctctccctgttgccccttcaaaggtctggtgctccgtccgcacacctgagagctcccacgaaggcctcatcaccgatccccacagcccctctcgcttccgggtcatcggctccctctccaattccaaggagttctcagaacacttcygctgcccacctggctcacccatgaacccgcctcacaagtgcgaagtctggtaaggacgaagcggagagagccaagacggaggaggggaaggggctgaggacgagacccccatccagcctccagggcattgctcagcccgcttggmcacccggggccctgcttcctcacactggcgggttttcagccrgaaccgagcccatggtgttggctctcaacgtgacccgcagtctgatcccctgtgaagagccggacatcccaggcacacgtgtgcgccaccttcagcaggcattcgggtgctgggctggtggctcatcaggcctgggccccacactgacaagcgccagatacgccacaaataccactgtgtcaaatgctttcaagatayatttttggggaaactattttttaaacactgtggaatacactggaaatcttcagggaaaaacacatttaaacacttttttttttaaggaaagaattggtatatttattatgttctgtttttctaaataacctgtggacaagggaagccccactgatttactccctctcttccccactccctgtgaggctgggctgaggcacggatccctgggccacagagcaagtctccaaatcagacagctgcctcagcccctgggatgtgtgatttcagctcctgtcacctcatgcaagggcgtggagaccagtagaggtgtggaggccaggcagagagaggagccygctctgcggggggcccagctcatgggcactgccccttcagctagsctgcctccgtcccctgagtccaacagtgggagccctagctgggaagttctgatccccaaagccacagcaggggactgatggctatagcagaatgaggtcgggtcaggaccctcaaacaccatctgggaacaccaagcaccctgaatcgagrctgcaggagccctgcggggtgagactgtgtcagagatacactgctggccacaagtgtcccctctcagtcccaccttttcgggctgtcccatgtctatctcaggggcccgttacctctctgcagcagtcccccatcccagccacaccagggtctgtccggccaaccctcttccccagggaaaggagaaaagagaaaacaggctgggcccggtggctcactcctgtaatcccagcactttgggaggttgaggtgggcggatcacctgaggtcaggagtttgagaccagcctggccaacgtggtgaaaccccatctctactaaaaaaaattacaaaaattagccgggagtggtggtgggcacctgtaatcccagttactcgggaggctgaggcaagagaatctcttgagctcaggaggcagaggttgcagtgagctgagattgcgccactgcactccagcctgggtgacagagggagactccgtcccaaaaaaaagaaaagagaaacagctgtcacctcccgcaggacccaaatcctctctctgagcaccgtcatccaccacatggctgggcctggctcccaggaccagtccagtcctctagtgccttatctgaggctgcagccgccagtctccaccccaaggagacagcccctgctcctagatgcccttggcctccgcagtgcagcccccaggtgtcctgactgaagcacaggccatagccccatttccccggtgcctgcagggctaacctccacgggagcccaggagctctggccggcaggtccatggcacagggcatcggaagactgcaaaactgctggacttaccctgggctgcagtccattgtcrgcccctgggttgaatcaagatagtacttgcagctagatggatgcttttagccaggggacattgtgasgggaagattcctccacccagtctggcctgtggtgtctgtctcctccctgagaccacagcttctccartagcagactcatgggcgccaccaagtggaagcacctggagcggcctctgccatccagtggggaagccaggccccgagacggaggtgggggcagcaygtrccctccacagccaccgctttcccgcctcagcagcccaggcctcctggcccagccctgcctggacagtgctctcccctcacccgggaagctggaatcctcctgcccgagaggaagcagacggcacagggacacccctgccaccttgggatctgcctccaagctggtgcagggtatcgagagtggattccagatggaggtcctggtcccagcacgcagcagtcctggtagctctgcagaggagacaggaacccgagaagtagctgaagcagaagccagcckcagtccccttgccacatagaggcgggcttctcccagccatggtgtyccctctgcctcccctcccccgaccctcctgccttccgcgtggagggtggtggtcctgtagtgtcagcaccagcaccatgggcttggaccccctccctggacasaggcaggtgtcctagggctgggggtgcagcccgagggaatggagaccacactcatggctcaggtctgccggggccggcagggggttggggaagaagagggctcaggcccagcaggggtggaagcccctgccactgccactacccgctccagagctttaaggaaaatgaagtgagacccctccccttaggcctggggagccatagggctggcttctctgtgggtgcgtggacgtggggttgggagctgggartctattttttgtattatgttttgagctactgtagttttggcgtggcactattgtaatggaaataaaatacttgtacggagggccatgtgtctgggtgtctgtcctcccaaggtgctgtgtgtcctttgaggccggcacagggctgtccaccctagcttctccagggctgggcgcatctgtccctgagagcaggggtcttggaccctgacaaatgccagaaggttgctcagtacctgtgcccccagccacccttccttcacctacaagtgtgtgagcaccccctgctggtgagaatgatgcacatcaccacctgggtccaagaggcctcctggtaaaaataatttttctgttatcttcgagcaarggagtttccaggtctcagatgtttgggcagggcaggcagtagggaaaatcaaagaaaggttcaaggagggccaggtgcggtgactcatgcatgcaatcccagcactttgggaggctgaggcaggtggatcacctgaggtcaggagtttgagaccagcctgaccaatgtggtgaaaccccagctctactgaaaatacaaaaattagccaggcatgatggagcacacctgtaatcgtagctatttgggaggctgaggcagaagaatcgcttgaacctgagaggcggagattgcaggagctgagattgcgccactgtactccagcctgggcagcagagtaagactccatctcaaaaaaaagaaaaagaaaaagcagggcacggtggctcacgcctgtaatcccagtactttgggaggctgagacgggtggatcacttgaggtcaggagttcgagaccagcctggtgaccatggcgaaaccccatctccactaaaaatacaaaaattagctgggcacagtggcgcacgcctgtagtcccagctactcaggaggctgaggcaggagaatcacttgaacctgggaggcagaggttgcagtgagccaagatcatgccaatgcactccagcctgggtgacagagcaagactctgtctcaaaaaaaaaaaggaaagaaaagttcaaggaagagtctctgatgtacactgtgcctcctggggtttgcgtgtgttcttcactctgcctggaatgttcttgcctgataaactacccatccttgaaacccccagctcagcttctcctcctctaggaagccttcctaacctcccagtcagtatcaaactcacacaaggcttccttctcctatcacagtgtatgggtttgctagtacctaacaaagtaccacaaacttgggggcttgcacaactcttagttctggaggctcaaagtccaagatcaaggtgttggcaacattgactcggttccaggctctcctagcttctggcaacctttggtgctccttggcttgtagaagcatcacccgggcctctgccttcatcttcatatggcgttctccctgcacgcgtgcctgtctctgtccaaatttcccccttttatgaagacaccagtcatactggattagggccaaccctaatgaccccgttttagctaattacatcagcaatgaccctattttcaatttttttcttttttttttcttctgagacggagtttcattctcattgcccaggctggagtggggtggcgtgatctcgactcaccgcaacctccacctcccaggttcaagcaattctcctgcctcagcctcctgagtagctgggattacaggtacgcgatgccacacccggctaattttttgtatttttagtagggatggggtttctccatgttggtcaggctggtctcgaactcccaaactcaggtgatccgcccgccttggcctccttcctcttccccgctctgagaccctgggacctctcactcctcctctcctccttttcccttctttgttaacaatagatcctaccccctccccacccagctccgtgcctgccccactccccaagcaggaattaaaaccccagcctggcccttcagggatttaccctgcagctaagcagatggaaatacgtgcaggatgcaagttaggaacaaatggaaaataataaattgtataaggaaaagggagcagcagaggctatccgtaagggtgaagttgctgcagaagggagggaccagagaagagtccacactttgagaatctaatacaaaaagaaacccagtgagaaatgggcaagtcctttataaaggaaactatgcaattttcctgaagaacataaaagaagacctgaataggccgggcgcggtggctcatgcctgtaatcccagcactttgggaggccgaggcaggcagatcacgaggtcagtagatcgagaccatcctggctaacacgatgaaccctcatctctactaaaaatacaaaaaattagccggacgtggtggcgggcgcctgttgtcccagctactcaggaggctgaggcaggagaatggcatgaacctgggaggcagagcttgcagtgagccaaaatcgcgccactgcactccagtctgggcaacagagtgagactccgtctcaaaaaaaaaaaaagaagacctgagtaaatgcaggtaaacaccctgcactttccatggatggaaaggttcaatataataaacaatacctgccgggtacggtggctcatgcctataatcccagcactttgggaggccgaggcaggcagatcacctgaggtcaggagttcaacaccagcctggccaacatcatgaaaccccgcctctactaaaaatacacacacaaaaaaaaaaattagctgggcatggcagtgggcacgtgtaatcacagctactcgggaggctgaggcaggagaatagcttgaacccaggaggcagaggctgcagtgagctgaaatcgtgccattgcactcagcctgggggacaatgcaattatttgcagattattatttattagatttattattatttgagactctctctcaaataataataattctccccaaaattaatttgctgttgcagtatactctcaaccaaaatctcaaggtaatttttcatggaacttgaaaaactgattcacatagaagatcaaatgcacaagagtggccaagcagaccaggcacggtggctcacgcctataatcccaccactttgggaggccgaggcaggcagatcgaggtcaggagatcaagaccatcctggctaacacgatgaaaccccatctctactaaaaatacaaaaaattagccaggcgtggtggtgggtgcctgtagtcccagctacttgggagactgagcaggagaatggtgtgaacccgggagtgagctgagatcgcgccactgcattccagcctgggcgatagagcaagactccatctcaaaaaaaaaaaaaaaaaaaaaaaaaaggaatagccaagcaaagacaattcagaaaaaatagaacaatgaagtagctggcctgatcaaaatatgttataaagcgatagtgaattacatatatggtattggtgtgggaatagagaaactgaacacttagaatggattagacagcaagaaatacttctgtgtctgtgtgggaattggtataggataaagggggcacttgtgcagtggcacacacctgtaatcccagcactttgggaggccgaggcaggaggaccacttgagctcaggagttcgagaccagcctgggcaacacagcaagacacctgtctttactaaaaatacaaaaattagcctggtgtggtggcacatgcctgtagtcccaaccactcaggaggctgaggtgggaggtttgcttgacccaggatgcagaagttgcagtgagctgagatcacgccactgcactccagcctgggtgacagagtgaaaccctgtcaaaaaaaaaagggaggctgtgactccatctctttaaaagaaaatagggaagctgggtgcaatggctcatacctgtaattccagcactttgggagcctgaagattgcttgagcccacgagtttgaggccagcctgagcttcatagcaagaccctgtctctacaaaaaaatacaaaaattagcagagtgtggtggcacgtgcctgtagtcccagctactctggaggctgagatgagaggatcacttgagcccaggaggtcaaggatgtagtgaactgtgattgcaccactgcactccagcctgggtgacagtgagagtctgtctccatcaatcaatcaatcaatcaatcaatctagtaggaaagacaactagactcaggctaaagaaaaaagttttaaaaatcatggaagaattttaattttcctcattgatatccttaaaccacacttcatttccaaatacacacaataacaaagtcatacttaaacctaacatgatacagctatcctggatgcaaccaaaaacacaccaacccttccccaggagaagatgcaaaatccttggataatgctcattcttctcttttgatatcctgtaacctaaataccataatataaagtttactattattttatttatttatttattttgagacagggtctcactctatcacccaggctggagtgcagtggtgcaatctcggctcactgtagcctccacttcctgggctcaggtgatcctcctgcctcagcctccccagtagctgggactacaggtacacgccaccacccccagctaattttttgtattttttgtagagacagggttttgccatgttgcccagactggtctcaaactccttggcctcaagcaattgcctgccttgccctcccaaaaagctgggattacaggcgtgagccaccacacccagcctaaattattaatatatctcatgttagatgataagggaataagagggaagaaaacaaaaatatttggctaatctatatacaaacattcataacaaaataaggaagaaatactcatagttattactgtcctcatttctgcaactggtcatgtggtcagagctggtctttataattcctcttcctccactgccctttccatattccttttcccttagcaagcacctcatctggtcatggttctttgcctggtggggtgacccaaaccttcattcctgaaattcctggaccgttaatagtcctgcctgaactgggctgttgtcgcttttgtttactttagtcacaggacgtggtactgatgctctccacttgcaatgaggttatgtcctgataaatccatcttcttttttttttttttttttttttttgagatggggtctcactctgtcacccaggttggagggcagtgtgcaatcttggtcactgcagcctcaacttcccaagctccggtgatcctcccacctcagcctccacgcactatcacacctgcctaatttttttgtatttttagtagagacaaggtttcaccatgtggcccaggctggtctcgaattcctgggctcaagcgatctgcctgccttggcctgagtgctgagattacaggtgtgagccactgcacctggccctgataaatccatcttaagttgcaaatatcctaaattgaaaatgcacttaatgcatctaacctactgaacatcatagctttgccctgaaatgtgctcagaacacttccgttagcctacggttgggcaaaatcatctaacacgaagcctattttgttgactagatatgttgactatctcacgtaatttattaaatacagcacactgtagattacagtatcagctgtctaccctcgtgatcgtgtggctgacttggagccgcggtcgctgccactgcccagcatcatgagaaagcattgtactccatattgctagcccaggaagagatcaaaattgaaaattcaaaggatagtttctactgaatgtgtatcacttttgcccatcataaagtcaaaaaatcataagtcaaatcatcgtaagacaaagactgtctatattaacagatgccctaagggagctcatgtattccagatatactctcccttacctctgttgtgtagcagcaatacaattttcccttagtaatcaagaccagtcatcccagccagtacagtgacctccttctttgcctgttaattttgggtatggggagcgcaacgcgactg

SEQ ID NO: 8812 - DNA, 57181 bp, Homo sapiens
  misc_feature (1)...(57181): n = A,T,C or G, or insertion/deletion polymorphism (see Tables 1-2)
ctgtgcagtggctcttgtcccttccggggactctggaagctaagtccctcgactgctgccccaagagctattggctcctgtggggtatggagcatctgagccagggcaggtcccgtcccatgtaagtgtcattccctgacacctgagctgtcacctaggggaggaggggacagaagggacagctcctaggtggccgagagggcagctcttgatgctgtcctgccagagtgctgcgtcccaggctcctgttcccctgagcatgccagagctgggtgtgccctatcctgtcttgagagtccacatttccttgagcctaagaggaaggccgcctggtgagcaggtattgatcttcctattccccacccacccgccaggaggccttctttgatctcctgatgagatcagatccctcctctctaacctctgggcttttttttttttttttttttctgacagagtttcgctcttgttgcccaggctggagtgcagtgacacagtcccggctcactacaacctccaccccctgggttcaagtgattctcctgtctcagcttcctgagtagctgggattacaggtgtgcgccaccatgcctggctaattttgtatttttagtagacagggttttaccatgttggccaagctggtatcgaactcctgacctcaggtgatccacccacctcagcctcccaaagtgctgggattacagacatgagccaacgcgctcagcctgggctacttttttatgttactcatcataactgccattaaagcatgagttatagaaatatttttgttttgtcttatttttttgagacagagtctcactctgtcacccaggctgtagtgcagcggtgcaatcttggctcactgcaacctctgcctcctgggttcaagtgattgtcctgcctcaccctcccaagtagctgggattacaggtgcccaccagcatgcccagttaatttttgtatttttactagagatggggttttgccatattggccaggctgatctcgaactcccggcctcaagcaatccacccgcctcagcctcccaaagtgctgggattacaggtgtgagccactgtgcccggccagttatataaatctttattatagagccttgttccccacctcaaactccagtcccgggagagcaagcctcatctctgttgttcacagctgtattttcagttcccagctcagtgtgagtcacacagtgggcactcttcaaagacttgctaagtggagaatttctatgtccagtcattcctggatcacttcttcactccctcacgcagtcacaaagggagggctgcatgtggaatttagcattcaacaggctggaagaggtccactgtgaccccagggttaaggcagatgtgaggctgccagagaaccaggttggtgtcacagaagcacgtgaaaggtctcacccttgtcatgccttcgtcaccctggattccattccttgtgtaggagcttacaaggcctgtgactttgggcaagttgctcaacttctctctgcctcggtttctttagccataggatggggttagtaaatgttcatttcattgattctcgtctcacatttttttttcactctaatacttccaaaatcgagatgtctcttacatgtcttaatttaactggaagtggtattttccttggtgagagaataatagagagcaatttatccatagaattttttttaaagacagggtcttgctctgttgcccaggctagagtgcagtggcaccaacatggctcactgcagcctcaacctcctgtactcaattaatcctcccacctcagcctccccagtagctagctgggaccacaggcgcaccacaaccatgcctggctaattttttctttttttttccccccgaaatggattttgctcttgttgcccagactggaatgcaatggcttgatctgggctcactgcaacctctgcctcctgggtttaagcgattctcttgcctcagcctcccaagtagctgggattacaggtgcctgccaccatgcccggctaatttttgtatttttggtagagacagggtttcaccatgttggccaggctggtctccacctcctgacctcaggtgatctgtccacctcggcctcccaaagtgctgggattacaggcgtgaggcacctcacccggccccctggctaattttttaaagtattttgtagagcttgggtcttactatgtcgcccgggctggtttcgaactcctgggattaagcaatcctcccacctcagcctcccagagtggcgggattacaggcagaggccactgcacctggcctggcattagagggaatgaatatggtagtgcctgcttggtaccattcatggctgtgagcaccccgggaaaggataaggctgttcatttagcacagtgcctgtgacatggtgagcactgggcagatgaccaccgttatctgtgttaatctggtgttttcgtgcatgttattcattattatgcctcccgtgctttagggatcttggaggattttcatttttgtcatctctgtggatcctcaaagagccctgagaggttggcctaagagactttactcacccacctcgcagacgcgtgaagtggggctcagtgggtggagaagccacctggggcatccctctgccccggcctccccactttacttctctccttctgcccacccgccaggtcctggctctgtccagcggctccagaaaggccagtgcggtgggtgatgtggtcaakctggtgtccgtagacgtgcagcggctgaccgagagcgtcctctacctcaacgggctgtggctgcctctcgtctggatcgtggtctgcttcgtctatctctggcaggtatgccagaggaggaagaggggatttgaacggagtcccccaccccctccttctccccctcctccttccccctcccacccttcctcctcctgacttagcattcaagaggctggaagaggtccgctgtgaccccagggttagggcaagtctgaggctgtgggagaaccaggttggtgtcagagaggcacatgaaaggttttacccttgttctgccttcatcaccctggattccattcctggtgtagaagctcataaggcttcctcccctctccctctgccccagcctcctcctcctgccctcctcctcttgcacccctccctgcaccctccctcctcctgcatctctcccaccttctgcccacgcaccccctcctcttcctgcaccccttccttttcctccttccccctcctcctcctcttcctctctcctgctccaccttcttcttcctttctgctctctgtcatcttccctcccacttcttcccttctcccttcttctcctctaccgtcctccctctcttccctctgctcttccctctccttctcttccctttcttcttcctctcctcctttttctcctccccttccacccccatctcctccttctcctcctcctccaatcctgtctcaatttgcctactattgtctgatacgatgggaaaagtcctcaataaggatgaccttcacttgaccttgggcaggaagttcaccctctctgggcctcagtttcctctgtagaaagatgatgatgatgacgttgatacttccccatgtgctactagggtacccagtaggcaagttaaccatgttttgaagttaccagtaaccctgaggcaccaccatagccactgtccacaaaacacaagaggagaacattttagggggaaaaattgctacttagtgttcaaaaaacacaaagtagccatcaggaaacaaccaaacaaaacaaacaaaacatttactttccaacttcattcctttaacgttgtggtataggattttctttttttaaattaaaatcagactctgggccaggcacagtggctcatgcctataatctcagcaatttggggggtgaggtaggtggatcacttgaggccaggagttccagaccagcctggccaaccccgtctctactgaaagatacaaaaattagccgggcatagtggtgggtgcctataaccccatccactcaggaggctgaggcaggagaatcgcttgagccttggaggtggaagttgcagtgagctgagataatgccactgcactccagcctgggtgacagagtgagactctgtctccaacaaataaataaaagtaaaaataaaattagactctgtatcgggaactgcctaggctcaaatcctccttctgaccacttaccagttgtgaatctgtgtgcaaggaccctactctctctgtgcctcctgttcttgtctccaacgtgaggatcataattaacagtagcactcctgccccagaggggctgaggcattaaacaagcccatatgtagaaagcacttaaaagggtgccrggcacacaactgyaccctgtaggtatttgtaatattatcattagttacttttccataaaggataagacagtagatgctttttacactggaggccacaccatctctcctgcaaatattcatctctgcccttggagtgcagaagtggctgtagaccatactaagcaaacaggcatggtattcctccaataaaactctatttatggatgctgacatttgaagtgcatatcattttcatatgtcgtgaaatagtatccttttgattttttttttttttttgagacagagtctcactgtgttgcccaggctttggtgcaatggcacaacttcggctcactgcaacctccacctcccaggttcaagcaattatccagcctcagcctcctgagtagctgggattacaggcgtgcaccacgacatctggctaatttttgtatttttagtagaaactgggtttcaccatgttggctgggctggtcctgaactcctgacctcaggtgatctgcccacctcagcctcccaaagtgctgggattacgggcatgagccactgtgcctggccttgtaaaaactgttaatggcattttgattgtaattgctgaatattccaaaaaaaactcgaatgctcatgcatatgattgtttttgctagggctaggggccaggactttttccagtgtcttcaccttgtattccagggccttgcaaacaataggcaggtgcttagcaattacaacataaggcactcagacagggcttcatgtgcagtacataaatgtcatcattaggaagaaagagagggagagaggaagaacgtgggaaaattcagggcaattgatcaggttgaccccaccgttgctaaaaatcagatgagaccaggcggggcacggtggctcacgcctgtaatcccagcactttgggaggtgaaggccggcagaacacttgaggtcaggagttcaagaccagcctggccaacatggcaaaaccctgtctctactgaaaatataaaaattagccgggcatggtggcatgtgcctgtaatcccagctactagagaggctgaggcaggagaatcacttgaacccgggaggtggaggttgcagtgagctgagatcacatcactgcactgcagcctggacgacagagtgagactccttctaaaaaaaaaaaaaaaaaaaaaaaaaaattagatgagaccaacaagatatccatagataatgcaccatgttactttgcttgtgtacttttcctgcctcttggtagacagttcctaacatcaccgtgaggtcttggtgaaggaggagtggacactgaggttgctacagtttaatgataccatttttcccccagacagagatgttcatcttctgctcacattccttgagtgtttttccaagccctgctgtgggctggtgtttaccctctgcgcccttctccattgagccactaggtagcgccattgccgcataaatgaaacaaactggcccaatgttagaaaatagtgttcccaggccaggtggggtggctcaaacctgtaatatcagcactttgggaggctgaggtgggtggatcacttgaggccaggagttcgagaccagcctgggcaacgtggtgaaaccccatctctactaaaaatacaaaaattagccgagtgacacatgcctgtaatcccagctactcaggaggctgagacaggagaatcgcttgggaagcagaggttgcagtgagccaagatcatgagactgcactccagcctgggtcacagaacaagaatccatctcaaaataaacaaacaaataaataaataaataaacatagtgttcctaaggactgagacgggaaactgaggcacacagactggagttggggtggggcttgtcaagagaatgggtccaaataacctgtgcagaaatctcagaaagtcacagcaacttaaaaatcatttattctaccccccacttccacattttcyagatatagaaaccaaagctgagagggggaagataaccatcccaaaatcaccacgttggtgggggagcagggttgccagagaaaacacaggacattcagtgaagtgtgagtttcagacaaamggaagaatttctcagtgtatgtcccaaatatttcacgagacttagactaaaaccttattcactctttatcttcaaatgtaactgggcattctgtatgatgatttactaaatctgacaacccttgcgagggatgaaatgaagattaggaaaataattaaacgcaataagagaaaatgccaaatgagaacaactctattcccattttgcakacaagagaattgcacctaagggagatgacttgccccaaggccacactcaaaactctcagggtcaggatttgaaccaggtcccctgattccataggtctcaactttactgttgtggctgggaacaccccccagtcccactcgtgtgtgtgcacaatctgtcttgaatataactctctccctatcgtgtaagagggctgtttccctccctgacattgaaggaccccaccttcagcaggcatctcctgacacagcagaccccatgagcacagatccctgggacctggtggctgcccttatcagattccctgacatccccatcttaggacccaagtctgaccaccttcggggtctgcagctgtgttacagaaaaggggtcctgatccagatcccaaaagagggttcttggatctcgtgcaagaaagaatycagggcgagtccataaagtgaaagcaagtgtttgtttgtttgttttttgagacggagtctcactctgccacccaggctggagtgcagtggtgcgatcgtggctcactgtaagctccgcctcctgggttcaagctattctcctgcctcagcctctcgagtagctgggatcacaggtgcccaccaccacacctggctagtttttatatttttagtagagactgtgtttcactatgttggccaggctggtctcaaactcctgacctcaggtgatctgcccgcctccggcctcccaaagtgctggtattacaggcatgatccaccgtgcccggccaaaagcaagttttttagtaaagtaaagatctaaaagaatggctactccatagagagagcaacccagagggctgctggttgcccatttttatggttatttcttgatgatatgctaaacaaggggtggattattcatgcctttccttcttagaccatatagggtaacttcctgatgttgccatggcatttgtaaactgtcatggcrctggtggagtgtagcagtgaggatgacgggaggtcactctcgtagccatcttggttttggtgggatttggccrccttctttactgcaacctgttttatcaggaaggtctttgtgacctgtatcttgtgccgacctcctrtctcatcctgtgacttacaataccctaaccgtctgggaatgcagcccagtaggtctcagcctcattttacccagtccctattcaagatggagttgctctggttcacgtgcctctgagagctgggctcctcgggatctcctgacatcctgccccttctatccccagctcctrgggccctcygccctcactgccatcgctgtcttcctgagcctcctccctctgaatttcttcatctccaagaaaaggaaccaccatcaggtttggcttttgggaaagggacggaccaggcaggaagtagggaggaagccacaggtcctggtgtgggagatgsggaggggagagctgagtgcgagcccacgggtctggctttgttcttgtcgtctgtgagctgcccatcactcagacctgcaccccctccccctatcstctcaatggacagtggctccgtccctccaatgttcaggccacaggccctgggtcagttcaatgcctttttctctcacatcccatctgtcagcagatttgcttggcatcaccttcaaaatgcatccaaaatgtcacacttcccagcataggctctccaaaccccatgatctctaacccaggtcacagcagcaagcccctggctcactccccgcctctgccctcagcctctctccactcccagccagaggagacctatgcaaaccaaatacgttgtacccctcctctactcagacccacagcggccccattttcctcagactgagccaaagaccccacagtggcccaccaggcccgccctgagctggccttattgcttccaacctcaccttctacccatctcccctccttccctgcctttccccacacatctcccatcctcaaacctgcccgatctcacacatccctgcaggccttcgctttagctgttccctccacctggatcaccctcactcccgaagatcctctgtcacctccctgcagtcagggcggcttccctcaccaccctccagcaaggaaatggcacgtccatccctcccctcccagcagcagcctctcctttgcctgccctgggattgtttttgcttttttccccccacagcacttcccacaacatacagggtcctacaggaagcacccggcagggttgattgccttgttttccttaactggaagctttgcaacagcacaggccactgattgtggccaactcggcatctagttagtgcttggcaggcagaaggttctcagtaagtgtttgtgaactatggaagaaaggagggagggaagaaggaaaggaggagaggaagaagggaggggaaggagagaaaaggagggagggaaggaaagataggaaaggggaggaaggacagagggaaggagggaaggaaagaattgagggaggaagagaaggaatgagggagagaaggaagaaaggggggagggagggaaggaaatgaaagagggaagaaagcaaaggaaagaggaagaaaggagatagggaaggaaggaaagaaaaggcgggaaagagagagggagagatgggggatggagggaaggaacttatttcctctcttggcccagctgtcccagtgtccgtctgtcacctgggctgtttcttcagcctcctgcgtggactcctctaaaacattctaggctgggcacagtggctgacacctgtaatcccagcactttgggaggccacacctgtaatcccagcactttgggaggccgaggcaggcagatcacctgaggtcaggagttcaaaaccagcctggccaacatggcataaccctgcctccacaaaaaatayaaaatttagccgggcgtggtggcgggcgcctgtaatcccagctactcgggargctcaggcaggagaatcgcttgaacccaggaggcggaggttacagtgagccgagaccacaccactgcactccagcctgggcgacagaggaagactcrgtctcaaaaagtaaaaccttctccaggcagctgcccctctgatgatgcccccgccccatggtgaagcacaagagaccctgaattcttctgcctgactttaaagtgccaagtgaccctgcccacacggtcctctggtcacactgagtgtcctctgagtcatgctattccctgtgcctgggttttagstgcccccgccacccccctaccccccagcccccaccccccacccccatctcaagcccctcccctccctcttctccagctccatccccccatcctctgcctgctcagcacgcacttcctggtcatttaagatttagctcaggctgtaatcccagcattttaggaggctgagggcagaggatcacttgagcccaggagctcgaggccaacctgggcaacatagtgagaccccaactccacaaaaaatgtaaaaggtaaaaaaaaaaaaagacgtagctcaggcatyaaccacctccaggtagccttcctgatggtgtcatacccaggtgggctcaggctgcctctgttctccgggcatcagaggcttcctccgtggggcacattatcccaggggcactcctgcagaagtccaggtacaggatgatggtggttggaccaggagtgagggtcaraggtgctgagaggcagacaggtttgggacgcagtttggtgagatgaatgggatttgctgaagggtggctgtcagggtgcagggaagarttctcarctgtccctgtcttcatctctctttttccctccgatcccaggaggagcaaatgaggcagaaggactcacgggcacggctcaccagctctatcctcaggaactcgaagaccatcaagttccatggctgggagggagcctttctggacagartcctgggcatcyraggccaggagctgggcgccttgcggacctccggcctcctcttctctgtgtcgctggtgtccttccaagtgtctacatttctggtgacgtcactctagtctctatgctgagcagcactggggaaggagtgcgggggtgggggcagggtgaggtaggtggagccccccagatcctaccaccccgtccatcaaaacccactcattctggatcctgttctctctgggtccctgctgtcttctacaagaactaattaatcatattattctagcaaaggtggcagtggctgataaagtctgctgaactctcagagagagttccaggcttctaccgatgtggggaggagggtacagatgcaggggggtggcagaggtagaatcctgggtcagagtgacttccctgatcctggccagcagatgtccatagccaccctgtcactggacgtgatccttgtcctgccattctgtaatttatttcatattgctgtcagaacaaccttcctaaaccacagttttaaaaaatttgatacgtaggctgggtgtggtggctcatgcctgtcgtcccaatactttgggaggccgaggtgggtggatcacctgaggtcaggagttcaagaccagcctggccaacatggcgaaaccctgtctctactaaaaatacaaaaattagctggttgcagtggcgggcgcctgtaatcccagctacttgggagtctgaggcaggagaatcacttgaacccaggaggcagaggttgcagtgagccgagatcatgccactgtactccagcctgggcgacagagcaagacttcatctcaaaaaaaaaaaaaagcaccacaaatggcaccaacacctagagccctcaagtgctgctcctgcctgcaactttagagtcatcttccaagggactctagaatcacaagttccaccacgtctagaacaacagggctaccaagatcaaaaactctgctgtcccccgatgcctggaacctagaggcattaggttctcccctaggttctagtgatgcctagagccrtggggctgcgcactcatcaccattagcaatgcgctgtgtctttagagagagccttatgtagcttatgactgcggagaggacatgtgttagcaggactgggagtgggatctacggagggaagcacatgcggacatggcgggtgggccacatggaccgtgcaggcaccacagcttgcccaggctgccctatccatgcttgcgtgtctcactgttgccccacgtgtcccccccaccccccaggtcgcactggtggtgtttgctgtccacactctggtggccgagaatgctatgaatgcagagaaagcctytgtgactctcacagttctcaacatcctcaacaaggcccaggctttcctgcccttctccatccactccctcgtccaggtgaggtgggtgcaagggctggagccatcctgggagagtgcgtgggctacacctggctccagcttccctacccctgccatttgcagagragagggaagacagagtgggagggagagggatggtgtggagctggaaaagaggcggrtaggggcaagaacagaggygggcagagagtacagcaaatacatctggaaggggtcagcctttggagggcaatgtgcagacctttccacacacacctcagaacatgcatacttgtccatctgcccagcaattccacatacaagcaatcatgtcagttcccttttttatacaaagcgattttgtttctcttcctttgctatctctagtcctttcagcatggtgaaaacaagaaacggyggcatacctgagccatctccatgttttttattttttatttttatttatttatttatttgagatggagtctcactctgtcacccaggctggagtgcagtggtgcaatctcggctcactgcaagatctacctcgcagattcaagtgattctcctgccccagcctgccaagtagctgggaccacaggcatgcacaaccatgcccagctaatttttttttttttttttgtatttttagtagagatgagatttcaccatgttggccaggcaggtcttgaaccgctgacctcaggtgatctgcccaccttggcctcccaaagtgctgattacagacatgagccactgcacccagtcttatttatttatttattgtgtttttagtagagacagggtttcaccatgttggccaggccaggctggtcttgaacccccgacctcatgtaataagcccgcctcagcctcccaaagtgctaggattayaggcatgagccaccgcgcctrgccgccttatttatttatttatttatttatttatttatttwtttatatttattgagacagtgtctcactctgtcacccaggctggagtgcagtggcacgatctcagctcactgcatgctcaaactcctggactcaagtgatgcttctacctcccagcctcctgagtagctgggactacaggcatgggccaccacatccggctaatttttttaattttttgtagaaacaaagagtcttgctatgttccccaggtctccaactcctggcctcaagtgatcctcctgcacttggcttcccaaagtgctgggattaccggcatgagccgctgcacctggcctaatctctattttaacgactggtctctttcttccccaaagatgggtttgtgactgggagagagcgcccccaggtggacaacatttgaaattgttccacacaatggcttgataaccttattggaaaagccaccatcctcttcccagatcttgtctgcagaatggcagctggcttgcttcggtgtcactgatttgtaggatcgcagaggtgggagatcaccaccatcaaggtcaccactcgggttgcatcgtttcccatgaactagaaagctttgtcctcacgcytcctatgcacagagcttggtagacaggaagctkttgccacacatcttgagacaccgacacccaaaacctgagttctttgctcttcttgctgggtgacctgcggcttcggttttcctaggcccgggtgtcctttgaccgtctggtcaccttcctctgcctggaagaagttgaccctggtgycgtagactcaagttcctctggaagcggtgagtgctgagtctggcaggaggggtgtgggagggatgggggatgtgggggccaccccrgcccataatggcaagccagcatcagyactggrgggagatgggggctgcgggcaatggatgacacgtgcagatcacgccatctgcgtgtcacttggaaactggcaccgtgctgctcttctttctgctagccattcagcgaccactsactgagcgcccactttgtaccatcctgggtgtacaacagggaacactctaacacagtggtccccaagctttttggcaccagggactggttttgtggaagacagttttcccacggaccggggagaggcgcgtggttttgggatgattcaaacacattccatttattgtgccctttattattattacattgtactatataatgaaataattatacaactcaccataacgtagaaccagtgggagccctgagcttgctttccgtcaactagatggccccaaagcgggtgatgggagacagagatcatcaggcattagattcttataaggaacacgcaacccagattcctcacatgcacagttcacaagtgttcgtgctcctttgagaatctattgctgctgctgatttggcaggaggtggagctcaggcggtgatgggagtgatggggagtggctataaacacagatgacactctgctcacctgccctgcgctcacctcctgctgtatggcccagttcctaagaggctgcagactggtaccagtctgtggcctgggggttgaggactcctgctctaacagaccaggtccttgtcctcatgcagaaagtcccaggtaataagcatgacagcattttgatcaagctggaaaatagcagcatttcaagcaccattgcacgatgagacttaccaagctcaagttacctgggcttccccctccaccccatccttcttttatgccacgggccaagacaccctcccccttgttgcactgaagaacctgggcaaactgtgtacctggaaaacacccacatagtggtaagaagccgagcctgtggcattcaactgcccaggtccaaatcccagccccagcactgactagctgggtgatcctgacaagtagatcatctctctgagcttccgtgttcccatctccaaaatgggcatgttaatcgttatagcagctaattgtgacgatgaatttaattgatctgggctaagccatgagagctttgatttttagaaaatctttcaggcaattctaactacgtcttaaggatcaagaaccactaatctaattacacttgttatcacagtgaaataataataataattagtagtagtagcagtagtatttttgagacagtcttactccgtcatccaggctggagtgcagtggtgcaatcttggttcwctgcaacctccgcctcctgggttcaagcaattctcctgccttagcctctcaagtagctgtgattacaggcgcccaccaccacgcctggctaatttttgtattttttggtagaggcagggttttgccatgttggccaggctggtctcaaactcctgacctcaagtgatcctaccacctctgcttcctaaagtgctgggattacaggcatgagacactgtgccggccacagtgaaattaataacacccccttcactctgggaaggctgggatttgatgataatttatttcagaaattcactaaytttttccataaatgaccagattgtgcatattttaggcctgtgggccacacagtctctgtcacaactgctcaaagcatgaaatagagaaatgaatggatgtggccgtgttccaataaaactttatttataagaaaaggcagcaggcaggatttggtctctgggccacagtttgcctccccctggattatgtagccatgggacacrgacagaacaagaaccctgcggggtcacccasaagccagtgagtagcagggcaatttgttcagtgggagagatttcttcctgcagcctctgcccctgkgggggcgggggatggtgcctgggggcctctccratgcaraggcyggccaggtcaggggtctcctgtaaatggcctcttgtgccctgcagctgccgggaaggattgcatcacsatacamagtgccaccttcgcctggtcccaggaaagccctccctgcctccacaggtacagaacgacacccgtagtaaccagcctcatgtttttagggagaagatgcatggggctcctgctgcctcccacctgagaggtggtgtaggtttccagcctgggactggagggtgggttwggctgggctggggctctgccggggaggttctcaggatacatctctacctcctgaaggtggggacctgcacagcatagaccagtatctcctgcagacggggaccagggcatctgagcctcccccattagggggagacacccctgtgctcccaggctggccaagacgatgccaagggagggctggctgagaggagccccaaggttcagccctatcagctgtgctcacttctgtgcctcctgtatcagtccraggtcatgatcatctatagtctccaactctatcgcttggtctttgtggccaaaaatctcagacagccctgaaactccctaagaagagaaggaatatgccccaggtagtatttgtattggttgtcattcactcacttcatcgatagagcactaggtatgggccacgctctgttctaggtattggggatagggcgaaggaaacagacaagggccctgctctcgtggggtgacatgctgatagaggtgaggcccaaacagaaaaccagagcaagggaacagagtacgatggcatgtctagcgagggaaggctttgcattcaagccgagatcataaggaaggagtgtctgggagaagagctgttcttttttttttttttttttttttttttttgaaacrgagtcttgctctatcacgcgggctggagtgcaatggcatgatctcggctcactgcaacctccaccttccggattcaagcaattctcctgcctcagcctcccgagtagctgggattacaggcgcatgctaccacacccagctaatttttgtatttttagtagagatgggttttaccatgttcgtcaggctggtctccaactcctgacctcaagtgatccacctgcctcagttcccaaaggactaggattacaggcatgagccaccgtgcccggcctgggagaagaaccttctaggcggtgggaatggcatcagcaaaggtcctggggcaggagagtgcctggacctgggtttctcaacctcagcanggttgatattttgggctgaaactcctttgttgggggctgtcgtgtgcattgtgggatgtttagctgaccccagtctctacccactagatgccagcagcaccccctactggttgtgacatccaaaaatatctctagatcttgccaaatgactcctgggggatgcagtcaccccctggtgagaaccactggccttttgtgttcaagaaacagcaaggaggtcagcaaggccagggccgagcagctgaggcacagagcggaaggaggcgggagatgtcattcctgatcgtcaggactttagctttgaccctgagtgaaatgggagtgctggcgggtttagctgggaagtgtcacgatctgacttgggttttaacagatccctctggtcactgggtggaggatgggctgtgggacgtggacaggagtggggcgggaccaagagtagcgggagggagggaggaaagagcctatttatcgcaagagccaaggcaggaggccaggctggtgaaaccctcaggctatagtcaaccctgtgtgtgtgtgcgtggtgtgcatgtgtgcacacatgtatgcgtgtgagcatggattgattgggtatgtgcatgcacttgtgtgtgtgtggatgcgtgcccacattgtgttgctgtgcatgctagcatgcttgtatgagtgtgcaaatgtgcatgcatgtgtgcacgctttgtgtgcatgtgtacatgcacaratgtgcacaggatagttcctcaaatagctagacaaggactgggaaaaagaacagccccacaggtcctcttggagactcccagagcaggaaagctcagctccgtctggggctcatccttcctcacagaggcgggctgaaccctaaccaaggtcatgtctcccctcttgcgtgtccagaataaacctcacggtgccccagggctgtctgctggctgttgtcggtccagygggggcagggaagtcctccctgcygtccgccctccttggggagctgtcaaaggtggaggggttcgtgagcatygaggtgaggccacccccagcctgtctgctaggatgtccccatcctgaaagtcccacttcctcgctgccttcccaccctccccatcccagccaagttcactttcactcattctctcyacctctcacccaccactgagagcccagctcccactgctcctcaaaacctatcccacctctgtccccatcatcctcctgtgaccaaagtaagttgtgttttagggtgctgtggcctacgtgccccaggaggcctgggtgcagaacacctctgtggtagagaatgtgtgcttcgggcaggagctggacccaccctggctggagaragtwctagaagcctgtgccctgcagccagatgtggacagcttccctgagggartccacacttcaattggggagcaggtgagagtttgggggtctttttgggacagggagacattgcagttgggagtcatttgggtccccgactcatcatgggcagtatgatggagaaatgagaggaatggttagggaagtagcggagaaaaagggctcagctcagcgtcaagcacgtgctaggtgctcaatacgtaatcactaattgataagcagaaatagacacaaagagagaggcagggagttgtggcagggattggcagtgaggagctctctgacaactgagagtgagaagacctagactcctgtcttactctgccctgccttgctgagtaatgttggtgtaattgcttcccctctctgggcctcaccaaggggtctggacagagatgtccaagaaacaggatatatgcatctggagctatggattgggcaggggttggcaaactgtgaccccaagccaaatccagcccaccacttgtggttttgttttttgttttgttttggagacagagtcttgctctgttgcacaggctggcatgcagtgatgcaatctcggctcactgcaacctccgcctcccacgttcaagcaattctcacacctcagcctcctgagtagctggaattacaggcacatgccaccatacctggctaatttttatatttttagtagagacagggtttcaccatgttggccaggctggtctcaaactccggacctcaggtgatctccccatttacctcagagacaaagcccaagtcatgacaatccctggcaaggtccctgtgacctggctctggtatccattagccccatctcccatcatcacctctcagctttactgcagccaccttagtctctgtgatattccctgatcccccacagcacactctggccccagggcctttgcactgctgttccctctgctggaaagctctccccaggagtcyccagggctcatccctcacttctatcaccttcacagagaggcctttcctgaccaccttatctaccaccacagccaccctactattgttagtgcaccctacacctgcacctgctttttctytttttcttttttttttttctgagacggagtctcgctctgttgcccaggctggagtgcagtggcacaatcttggctcactgtaacctccacctcctgagttcaagcattcctcccacctcagcctcatgagtagttcaagcaatcctcccacctcagcctcatgagtagctagaattacagccatgtaccaccacaactggctaatttttttttgtacttttagtagagatggggtttcaccatgttggccaggctggtcttgaacttctgacctcaagtgatccacccagctccgcctcccaaagtgctgggattacaggcgtgagcccctgaacctggctccccctgctttactatttattcttcatagcactttccacctgatgtgctgtctgccttacttgtttatggattgcctgtctctgtccccttcatgagaatgatggatccattaagagagcagcaactttgttttgctcattgctgtttctccagagcctagaaccatgcctggtttatgataacgaggcagtggttattagtggaatgactgaatgtaagaatgaatgaatggctgggtacggtggctcatgcctgtaatcccagcactttgggaagccaaggcgggagggttgcttgaggtcaggagtttgagaccagcctggccaacatggtgaagccccatctctactaaaaatacaaaaattagccaggcatggtggcgtacctgtaatcccagctacttgggaggctgaggcaggagaatcgcttgaacccagtaggcagaggttgcagtgagccgagatcaagccattgcactccagcctgggtgtcagagtggaactccatctcaaaaataaataaaaataagttttaaaagaatgaatgaaagacaagaaggcctagatagaaggaataagttaaagtaatcaatagtgcacaagggaaattatagttaatgatcatttacttgtatatttcaagatagctagaagagaaggatggttgtgttcscaatacaaaagataaatatttgaggtgatgactatctcagttaccctgatttgatcattacatattgtctacagcaggggtccccaacccccgggccatggatcagcaccagtctgtggcctgttaggaactgggcaggcagcacagcaggaggtgggcagagggcaggcgagtgaggtttcatctgtatttacagccattccttattgttcccatcaccgcctgagctccacctcctgtcagatcagtggcagcattagattctcataggagcacaaaccctactgtaaactgcacatgtgagggatcttatgagaatctaatgcctgatgatctgtcactgcctcccatcatccccagaagggactatctagtttcaggaaaacaagctcagggctcccactgatactgcatgatggtgagtcattatatattacaatgcaataataatacaagtaggccgggcgcagtggctcacgcctgtaatcccagcactttgggaggccaaggtgggyggatcacctgagggcaggagttcgagaccagcctggccaccatggtgaaaccccatctctactaaaaatacagaaactagccaggcgtggtagtgggtgcctgtaattccagctactcaggaggctgaggcaggagaattgcttgaacccaggaggcagaggttgcagtgagtcaagatcatgccattgcactcccagcctgggtgacaagagcaaaactccatctcaataataacaacgacaacagcagtaataataataatagaagtgcacaatcaacgtaatgtgcttgaatcgtcctgaaaccatcccccggrccatccccctgcccccaggtccatggaaaaatcgtcttctacaaaactggtccctggtgccaaaaaggctggggaccactgccctacaggtatccaaataccacttgtgcccctcgaatagttacaactattacatatcaatgaaaactaaaagaaaacaattaaaatttaaaataaaaaagtaggactgaaaagctgccactggatgagggaatagggaaatggatggtggtctcagtggagaaagggaaacaagagttggactcaaagagatagagagagtgagcaggaggagacagagtggattgggaagtgtaggtaactcctccaggaagcgtgcttgggaagtggagaagtgaggtcgggtaaggatggaggcattgttggcttgagagcgagtgccttggaagctgggcctgtccccagggaataggcatgttgagctgtacctcaccctgatgggcaggtgtgccctgacctgccacagcctgggcaccccagtttcaccctgtagatgctgactcaggccactgttccttttgtggccacagggcatgaatctctccggaggccagaagcagcggctgagcctggcccrggctgtatamagaaaggcagctgtgtacctgctggatgaccccctggcggccctggatgcccacgttggccagcatgtcttcaaccaggtcattgggcctggtggrctactccagggaacagtaagtttgggaacatgtgtcagacagtacagggcaaaggcagaggaagcacttagcatccagtcctaacccaagtttatctcacctcccccttccacttgagtccaatttcctctttgtattggtcagcttttgctgtgacaatgytatgtaacaaacaacccccagatcccagcagcttacaacagcaggtgtttcttccttatggatctgtgatttaactactacagctttgccttggatgattggccagggtcagatgtactccttgtcttcttgttttgagacacaggctaagggagtcccctctgtttctctatttggatatgctgtttacaagaaaggcggcaggagcacaagaaggggagctgtccccactctgagtccagggacaatacccccaccccaacccccagctcaggaggctggccaagcacatgtgtgtaacttttttctttttcttttttttttgagatggagtctcgctctgtctttcagtctggagggcagtggtgcgatctccgctcactggaagctccggctcccgggttcacgccattctcctgcctcagcctcccgagtagctgggactacaggtgcccgccaccacgcccagctaattttttgtatttttagtagagaaagggtttcaccatgttggccaggctggtctcgaactcctgacctcaggtgatccatctgcctcggcctcccaaagtgctgggattacaggcatgagccactgcgctcggccgtacattttttttttctttctttctctctctctctctttccttccttcctttgtttcttttcttttcttctttcttttcttctctttctttctttcctttcttgacagagtcttgctctgtcacccaggatggagtgctgtggtccaatctcrcctcactgcaagctccacctcccaggtttaagtgattctcttgccttagcctccaaagtagctgagactacaggtgtgcgccacctcacctagctaatttttgtatttttagtagagatagggcttagccgtgtcagccaggctggtctcgaacttctggcctcaagtgatccacatgctttggcttcccaaagtgttgggattacaggcatgagccactgcacccggccacatgtgtgtaacttctaccccttccctgcccagacacggattctcgtgacgcacgcactccacatcctgccccaggctgattggatcatagtgctggcaaatggggcyatcgcagagatgggttcctaccaggagcttctgcagaggaagggggccctcrtgtgtcttctggatcaagccagacagccaggagatagaggagaaggaggtactaggtgggctttgctgattctccaggcctggctcctgccacccttgggggaaaaggctcgaagggtcctactggcatgaatggagtgctctggccacaccctgtctgcaggcctaggcctggaagcagacagctctcttaataggtcacctttctccaagaatagccgataacatcatccatgagccaggggttgtgctaagtgcttctgtaaaaaatacactatttcatttgattctcacacatgccccagaggcatgtgaagttattgctgtcattttacagatgagcaaactgaggcaaagagagttaaatcacttgcccaaggtcacaagattagaacttgagtatgtccagctccagagtctatgcttgcagttgctatggagacagcccaagaargactttgatgcctagcaagctacaccrtgctagctagggtttctaataatccaraaaaacagtgtgctggatacatggcaaggttctggaagtaaagttgccaagccaagctcactcacaatgactgaaaagtagcaactaacagcacatcacagaggttagctcatttaatcaacataatgcccctgtgaggctggtactagaatcatttccatttcacagatgaggaaactgaggcccagaagttaaggaactagtcccaggttacatggcttgtaagtggcagcactgggatttgaacccaagcaacttgattccagagaatgtgttttttaattgctaccctctacactatcccttcatgacaaagcaaggattcacatccaggtctccctcaatctcaggctttgcttcttctgagaacatctgcttagcactggcccaacctggttaaaaccttaagtgttgattcacaatgtcacagtcctgaagcttgaagatagaacttgcctgtttgtgttggtcagcttttgctgtgatgatgctgtgtaacaaatagccccccaaatcctagcagcttacagtagcagttacttgttgcttacaggtctgtggttaaactactacagatttgctttcagttactggccacacctgggggatagtggtggggaggtgtccttcctaggggagatggtacctgagggtaggtgagagttagccagaaaaragcattccagacacaaggaactgcttgagcaaggctgttgggkgaaacagaggtaacttgactttgtacagtgttaaatgctgtttttccaacctcaagttcatagtaggtgctcagttatcactgaytgaagaaatgaatgagtgagtgaatgcctgaaggatgttcctggaagaactcagagtggggtgttgagagaggttgctggagaygtggcaggagccagatcaggggaaatggatggtcagagcggttaaggccacatagtcagtgggtgtcaaagtgggtatctgggccgtgttgcgtgacaggactctcttgaccttgcagaaacagaacctgggaccagcaccaaggaccccagaggcacctctgcaggcaggaggcccgagcttagacgcgagaggtgagtccaccatggtgccacactcagaagggcacaggctgaagctgaagtagctgaagggaccacccgcatctcgggcagttaggcgggcaaccaaaaccattatggatagagaacctgctgaagtccccccatggtgccctgctgagggataatttaccaaaattggtccagttagccaagatgattaggccccyataaggccagttcatggaatgaacaatatgccttccaattgatggatgtcttcaagtgggccgaggccagcttgctggagttgtctgaatgctgcagtagggcaggactggttcctccccatagctgtaaaccaccatgccaggccyggccacttatgctttgacaggctggctatgcacagggcttgggtctgtatgcacagcatcacttgacgctggccagaacacgtgggcaaggggccaggaggaggcctccggtcccctcttttctcagctccctccagccaggacacagctgggytcactgtggagctgtckgcagcagaaggacctgctgcctgatactctcccctcttaatgagaggggtcttgggaagcagaacaacaggccactgataccagatggcctgagcttaagtgcctgctatacaggggtggtgggcggcagcgatcttgaggggcctcagtccccagggaccattggggctgacccccatcccagctagccaccctgagggcacttctcaatcacacacacactgagaaatcccaccaccttcacagcgcacaagaatctgaagtaagatcagatggataggtagtcatgttaaaagaaaaccagtagacacattaaggctgggcacggtggctcacacctgtaatcccagcactttgggaaactgaagcgggtggatcactagctagaggtcaggagttcgagaccagcctggccaacatggtgaacccgtctctactaaaaataaaaaataagtaaatttaaaaaaaaaagccggcgtggtggcatgtgcctgtagtcccagctactcgggaggctgaggcacgagaatcacttgaacctcggaggcggaggttgcagtgagccgagattgtgccaaattaacctctagcaaatttaatgtgtctgaggttttttgttttttgcgggggggggggggtttgagacagaatcttgctctgtcgcccaggtctggagtgcaatggcacaatctcggctcactgcaatccccgtctcccaggttcaagcgattctcatgcctcagtctcttgagtagctgggactacaggcacatgtgaccaggcccggctaatttttgtatttttagtagagacagggttttgccatgttgtccaggatggtctcaaactcctgacttcaggtgttccacctgcctcagcctcccaaagtgctgggattacacgcgtgagccactgcacctggctaacagaggttaactaagcaaagaatgatccgcacatcgggcagtccctgaaccagaatacgtccagagaggctctggtacagccacggggtcaaagattaayagacagaaaaaggaaggtgaaggacagaaaacagaagtgaggtacagaaacagccggattggttacagctcagcgtttgctttattggaacatggtttgaacggttggttgcctttgattggctgaaactcagtgattgacacaggagtaggttgcagtctgtttgagtccaattaggttacagttcactatgtacggggaaaacctttaggccaaacttaaaatatgtaaggaggcagctttgggctaacctcaatttaayagaaggtaggtagacatgtatatgtagatatacaggtatgtagatgaatggataaatggatggatggatagatagataatattcctatttttacagctgaggaaactgaggcacagaggttaagtcagccyactcatccacagataaaacattcaaagagtctttagcatctgaattgtgcataatttatattctgccagttggactgacaaatctgatggtatacagtaggaacaaaacaattgcacgaaagcttaagccaaaataaaaattctgagaacaggctgggcatggtggctcatgcctgtaatcccagcactttgggaggctgaggcaggtggattgcttgagctcaggagtttgagaccaacctgggcaatgcagcaagaccccatctcaaaaaaaaaaaaaaaagaaaattctgagaacagagttccaatggtgggcaagttaagttcatcctgtgaattggcatcagaagaatgggcttgcttgaccctggggtaatagatggcatttagctgggtaccatatgggaagaagggaagtgtgatatctggtcagtattctgttagataaatgaatgaatgaaagagtacagagtgtacccagagctcagtggctgtcagtgggcctgagggttaggcacatacaccccaccattgggagagatactgactttgtcttcatttcctctaaatgacaggtccatcaagtcagtccctgagaaggacygtaccacttcagaagcccagacagaggttcctctggatgaccctgacagggcaggatggccagcaggaaaggacagcatccaatayggcagggtaaccaccagcttcacccacccctccccacccactgtgccacctccaggggcccaagtcctcccaccaaatgtagcacttggcagtgatactcacctttcttgagcacctactatgtgccagtagcattctagatgttcattttcttaatcctcacaaccaccctaaaaaatagatatgataggtctatttcagacataaagaaactgaattcttttaaaatttattttattttgattttgagaaagtggctcgctcactcacccaggctggaccgcagtgatgtaatcatagctcackgcagcctcgacctcctgggctcaagcaatcctcctacctcagtctctcaagtagctgggactacaggygtgtgccaccatgcccagctaatgtttgtattttcagtagagatgggttttgccatgttgcccaggttggtctggaactcctgggctcaagtgatcctctggcctctgcctcccaaagtgctggggttacaggtgtgagccactgtgcccagccaagaaactgaagtcttaaasagttaagagacttgtttgtgttttcatatctagcctgggacacaacctgggactcaaatctaggccaatctgagtctgaagcttacactgtttctcatcttctatactgctatgtatctccacccacctacttacccattccatcatccacctagatgctcatccacccacccacctatccatcccacccactcatttatccatcccatccattcacctacccactgatttatccatcccacccacccatttatccatcccatccactcatttatccatccatcccaccccctcatttattcatcccacccactcatttagccatcccacccactcatttatccatcccacccactcatttagccatcccacccactcatttatccatcccacccactcatttagccatcccacccacccatttatccatcccacccactcatttagccatcccacccactcatttatccatcccactcatttatgcatcccacctactcatttatccatcccaccctcccatttatccatcccatccacttatttatccatcccacccacccaaccactcatttatccatcccacccactcatttatccatgccacccacccacccattcatttatccatccatcccacctagtcatttatccatccctcccaccaactcatttatccatccccacccactcatttatccatccatcccaggcactcatttatctgtccatcccatccactcatttatccatctatcccacccactcatttatctgtccaacccatccactcacccacctactcatttatccatcccattcgcttacccatccatctatcccacctaacaatacatccaaccattccctcacctatgcatctgtctgttcagctgttcatccattcattgatctttccatccattcatccactcattcacacacctacctacctacccacccgctcatttattcacccacctaccctctcatccatccagcaaacatgtacacaatacccactatgtgccaggctaagtctggtagagattagacactagtgaggatagacggagagtaaataattatgctaataagtaagctatgtccaataacaataagtgctataaagaaaataagaatgatcaggcgcagtggctcatgcctgtaatcccaacactttcagaggctgaggcaggaggattgcttgaggccaggagttcgaggctgcagtgagctatgatcatgtcactgcaatccagcctgggtgacagagtgagaccctgcctcttaaaagaaagaatgatgaaatagagaccactgagaaaccataccatggttggtatggacaggatgctctgagaagtgacatttgagcttccccaaagaatgtgtgaaggaatcartcatacaaagggcaggagaaagagcgctccaggcagagagagcagcaggtgcaatggctccgaggtgggaagtagcttagggtgccagagaaaggggtcccatgaggctggcaggcagtgagtgggggcgagataagaagcttggaatttctttctttctttctttctttyytttttttttttttttttttttttgagacagagtttcgctcttgtcgcccagagaagagtgtaatggcgcaatctcagctcactgcaacctccacctcctggcttcaaacgattctcttgccttagcctctcgagtagctgggactacaggtgcctgccaccacacgtggctaatttttgtatttttagtagagacggggtttcactacgttggtccaggctggtctcaaactcctgagctcaggtgacacacccgccttggcctcccaaagtgcttacaggtatgagccacccctcctggctgggatttcttctaagagcaagagatagccatggacaggccaacgacaagatataattagattaatgttttcaacagtcccgcctggctgcagctgtgcagagaacttcagatttgtaggagcaggaccttaagccagtggctgaacctctctgtgcctcagtttccttatctgtgaaatggaggttgttataaggagagacacatgcctgacctatggtgggtgttcaagaaaacccttctagctgggtgtggtggctcacacctgtaatccaagcactttggaaggccgaggagggaggatcgcttgaggccaggagtctgagactagcctgggcaacacagcgagactccatctctttaaaactatgaaaattaacaaaacatggtggtacaaacctctagtcctgactactcgggaggctgaggcggggggattacttgagcctaggagttcaaggctgcagtgagccatgatcatgccagtgtactccagcctgggtgacatgggcgacaaagcaagaccctgtcctcaaaaaaaaaaaaagaaaagaaaaaatattaatactagctccctggggattgtataggagatgggggttctaaggctggctggggcctgtcggggaaatggtgctcctggtgggaggcacagcgggagaaccggtgaggtctgcgtggtggtcccatctgccatgggcatgttttctgggagcctcgcctggccttgcctcaacccacccctcccactgggggctctctctgcctccctctccctcatgtgtgctacaggtgaaggccacagtgcacctggcctacctgcgtgccgtgggcaccccyctctgcctctacgcactcttcctcttcctctgccagcaagtggcctccttctgccggggctactggctgagcctgtgggcggacgaccctgcagtaggtgggcagcagacgcaggcagccctgcgtggcgggatcttcgggctcctcggctgtctccaaggtacgcctcacctgccctcctcatccctctcctcccagctgcaccaaggggtgctcaggactcctttaccccacccctccctgggtcaccctgtccccctggaacagtgtgcaaaacgtctggggtccaggcaaagatctgygtccttaagatgaggctggagggaacgggaaggacagggcacatccctccttttctggaagcttcagaacctctcccagtccctccccactagcggaaggcgtctgcaaggcctgcctgctggtggctttcagtgcctgcccccaaacctccagacagagccagaccctccctaacaaatgcatcaccgctatcactccttcttctcctcgtcaaaaatggaaagacttcttcttgaaataattgtagattcacatgcagttctaggaaataaggcagccagctaccttgaacagtctgcccagtttctcccattggtgatattttgcaaactgatagtaaagtatcacacaaaggatcctgacacccatcaatccatggatctcaattatttatttatttatttatttgtttattttattttgagacagagtcttgctctgttgcccgggctggagkgcagtgctgccgtctcggctcactgcaacccccatctccgaggttcaagcagttctcctacctcagcttcctgagtagctggaagctgggattacaagtgtgcagcctggttaatttttgtatttttagtagagatggggtttcaccatgttggccaagctggtctcraactcctgacctcaaatgatctgcccgcctcggcctcccagagtgttgggattacaggtgtgagcccycgcacccggccctatggatctcattgtgatttccccagttttgcttgcacgtgggtgtgcgcatgtttgcctctgtgcagtcgtatccccwgttyagtctctcgcatccatcacgatggttgacagttgagatactgaacaacmccstcaccacgaggcgctctcgtgttgcccttttgcaaccacacccacccttctcctgcctcgcccaccctgtccccaacccctggttcttctccttttaatacgtggcctggctgaagggagtaacaggagtgcacatgtgagtttggcttcttatttatacacacacacacatatatatagactgggtctggctttgtcacccaggctggaatgcagtggcacgaactcggctcactgcaacctctgcctcctgggctcaagcaatcctcccacctcagcctcccgagtagctgggactacatgcacatgccaccatgctggctaatttttgtttttgatagagacagtttcgccgtgttgcccaggctggtctcaaactcctgggctcaggcaattcaggcaatcctccgcctcaacctcccaaagtgttgggatcacaggcatgagccaccaggcccggcctggtctcaaactcctgggctcaggcaatcctccgcctcaamctcccaaagtgttgggatcacaggcatgagccaccacgcccggcctggcttcatctttaaaggacagttgcctcgttttcatgttgattcgtcctcattcactgggtgacattggccacatcaccaaaatgctgtgagcctgtgacctcccctgtaaaatagggggcgccaggcctgaacttgaggactcttctagtcctaagaacctgtacacctactcaccacaactgcatgtacagtggaatactcaaggcgaatggttacttaaccaagaggaaattagggattctcagagtcagccgagccctggaattaacccaaatcctcatttgggtggcaaatagccctttcaaaatccttccacttccatccctcatttgatagctaagggcaagtcttactctcccctaaagatggagagatgggagctgagagagagaaattggttatgactctcgaatacaaagaataaaaaattcagctccaggccagatacagtggctcatgcctgtaatcccagcactttgggaggccgaggcgggtggatcacttgaggtcaggagttcaagatcagcctggcgaacatggtgaaaccccgtctctactaaaaatacaaaaattagccaggcatggtgtcagtgtttgtaatcccagctacttgggaggctgaggaaggagaatcgcttgaacctgggaggtggagtttgcagtgagcagagattgcaccactgcactccagcctgggtgacagagcaggactccgtctgaaaataaacaaattcagctccaattcaaagtgtttaagcaacaagagaattgattggctcttgggaccagtatccctagatttctggcttcaggtatggctggatgtaggggtccaaacaagaaatcgctttatttccctcctctgtgacagcttcctgtccagcttagctgctscccctggcagtaagatgatattccacagctccagcttggctacctccaacaaccaagtaccacttttccaaaagttctagtgaagtcccaggtctccctgtcattggcctgacttgggttatgtgttcatccctgaaccaactgcagtggtttggattggccatggrtgaaatttgccccaccccagaggagaagttagccccaccccaggcatacagattagcactgggaggaaggatgtgcatttctctcacagggctactgccaaacaagttgccacaaacttgggagcccagcacaattgaaatttgttctgtcgcagttctgaggcctgaagtctaaaatcaaggtktcagcagtgttaactctttgtggaggtttttttggtttttttgtttgtttgtttgtttgttttttctgagacggagtcttgctctgtcaaccaggctggagtgcagtagcacgatctcggcttatggctcactgcaacctctgcctcctgggttccagtgtttctcctgactaagcctcctgagtagctaggactacaggtgcctgccaccacgcccagctaatttttgtatttttagtagagagtagggtttagtagggtttcaccgtgttgctcaggctggtctcgaactcctgacctcaggtgatccacccgccttggcctcccaaagtgctgtgattacaggcatgagccactgtgcccggcccctcgtggaggctctgatggagaatacrccccaggcttctctcctggtttctggtggtcgccggcagtcgctggcattccttggcttgtagatacaccctcccatctgtgtcaccatcttcatatctcctgctgtgtctctgagtatcctctagtattcttatataaatggcagtcactgaatttaggacccatcccaaatgaattttgggggacactcttcaacccattacatcaagaaacaagcagggtacaggcgcagtggctcatgcctgtcatctcagcactttgggaggccaaggcaggcagatcacttgatcccaggagttcgagaccagcctggacagcatagcaagatcccatctctacaaaaataccccaaattagccggcatggtggcgtacacctgtggtcccagctactcggagggtgaggcaggaggatcgcttgagtgcaggaggtcaaggctgcactgagccatcatcatgctactgcacttcaacatgggtgacagagtgagaccctgtctcaaaaaaatataataatcagggtggccaagccataagatgtccaccatggggtagcgggagagacctgcgcagggccccgtgggccgctcctgagggtctccagccctcatgctcttacctcctctccctccccagccattgggctgtttgcctccatggctgcggtgctcctaggtggggcccgggcatccaggttgctcttccagaggctcctgtgggatgtggtgygatctcccatcagcttctttgagcggacacccattggtcacctgctaaaccgcttctccaaggagacagacacggttgacgtggacattccagacaaactccggtccctgctgatgtacgcctttggactcctggaggtcagcctggtggtggcagtggctaccccactggccactgtggccatcctgccactgtttctcmtctacgctgggtttcaggtacggagaggtcagggaggcttccgggaccggctgaggtcaactcagccagtcccctgtctctggggaagactccatatatgaggtttcacccagctggacatctaggggctgttcctagaattcccagggacagggacactacagtctttctggtatctccactagtgtctgtctctaaatgttcacatcaaagttcttttttttagagagacagaatcttgctctcctgccaaggctgaagtgcaataggtgatcatagctccctgcagccttgaactcctgggttcaggtgatcctcctacctcagcctctcaagtagctgggactacaggcacgtgccaccatgactggctaatttttaaatttatttttgtaggacaagtgtcttcctgtgttgcccaggctggtctcgaattcctggccccaagtgatcctcccaccttggcctcccaaagttctgggattacagggcatgagcccctgtgccccacggcacagttaaatattaagggccagagcctttcacgygtaatgtttttatcctgccgtaatttcttcctctccaattatctggaagccaaaaaggcattgcaaggtctcaaaggctattatatgaagctagattctttcaattgctgggaccagcraccaactaaaattagcttaaccaaaagaatagaatttaatggcttatatttccttgggggcatgggcccagttgtcatcaggacacagtgactctctccatatcttcactcagtgcttctcaaagtgtgaccccaggaccagcagtagtatcacctggggactagttagcaaagtacattcttaggccccagcccaggactactkcctcagatactatgtgggtcggcccatgaatctaggttttaattaaccctccaagtaattctgatgtacacaaatgtttaggaaccactggcttacctctggtctaattttgtacacgctctctttccagggcaggtcttatggccactagctatcatatcatctcaccttagcaactcaacatgcaaaaaacgtttcttcagctcagtagtcatatattaatcccagggaaggttctgattggccctttgtggatcatgtgtccatctctgaactcgtcacagtaactgaatggatagtagattctgatacactaggctgcatcatgtgaccacctctctgatcaggtcccatgattgacagcaccccaacccagccctttcccacaggaaaccagaagtagaaaacatggtagtcagataaaaaccatggctagggctaggcatggtggytcacacatctaatcacagcactttgggaggctgaggtgggcagatcacttgaggtcaggagttcgagaccagcctggtcaacatggtgaaactccgtctactaaaaatacaaaaatttagccagtgtggtggcgcatgcttgtaatcccagcttcttgggaggatgaggcgggaggattgcttgagcccgggaggcagaggttgcagcgagctgagattgcaccacygcactccagcctgggtgacagagagagactccatctcaaaaaacaaacaacaaaacccatggctaccactgtccccgacaattgtcctaggtcttctctaagttcacttgactccgaggatgggctgtttctgtctcaagctttagagtcaagcaaagatgggtttaaatccaggctctatcacttactgtggcactcaggacagctgctgaatcccccgagccttggatgttctcaccactaactgatgaatgacgcgaatgctcactctgcaatgaatgagacactgtgtgaaaagcctggcacatacagttgggtgttcagcaaattcagttcctccctgcctgcctgtctgccagctgcacccaacctgcagctgcaaaccaaataacgaatattttctgcacatcacctggcatgtaacccttgggttacatgagtgaaactgacttggccaactgccttcattgccccttacagttttgttctcccactgaccagccgtaaatgaagtagtcggcctcagtgctgggaagtgagacacttaaactaaattggtggtttctcaaccctggctgtcccttagaatcatctggaaggctatttaaacagcaccaaagtcaaggtgacatttccagagattccgattcagtcattctggggtggggcattagaggtttttgaagctccccaggtgattttcaaaaaaaccatagaactctgattctgcaaggaaatgagaacccagagagggcaagcaactagcccaaggtcacacagtaagctgttaacagatcctggtctggaatcctgtacttggggctctctgtgcttctggaaactacctctctatgtctgtggcttctcctcttccctctcccatccatccttctcagagcctgtatgtggttagctcatgccagctgagacgcttggagtcagccagctactsgtctgtctgctcccacatggctgagaygttccagggcagcacagtggtcyvggcattcygaacccaggccccctttgtggctcagaacaatgctcgcgtagatgaaagccagaggatcagtttcccgygactggtggctgacaggtaggaagagccagggcagagaagaccttgcaattcatccatatccttagagggtgagacctgaggtcatattgtatggtagmgaggtcacccagagagtcagggacatagttgaggctagatcccacaggcagtctatcagttctcaccgtgggcagatggaacatgaccragagattctcaacagcaggtgggcggggggtacaggaagaagcttctgttgccaggcaactggatcaacctcttttgccttggtgataaagcagccatataagcatcctcagccatctttaggtactaagcaagaacaagaacacaagctttaagcacaaatagacacaggttcaaatcccagctctgccacttaccagctggttgatttcaggcaagttacataacctctctgagcctcatttgtcaaactgggatcgtgctcatggagtggatatgaggattaaatacagacactcataggtaagacctgtaacatgcttactgcatgcctggcactgttctgagcaatctatgtagattaatttatttaattctgctaacagcttcaccaggaagaaactgttctatagatgataaatcctaggcacagtgaggtttggaaacttgtccagggtctcacagctaatactggcagagccaggatttgaatccaagcagtctggtaccagagtgtggagagggtcaagtacacactaggtgctcaatacatgtgaagtcctttttcctttcatctcaggtccccagccagctggggctgtgtattagtccatcttcacactgctaaaaagaactacctgagactgagtaatttataaagaaaggaaggtttaattgactcagttccacgtggctggggaggcctcaggaaacttacaatcatggtggaaagggaagcaaggcacgtcttacatggcagcaggagagggagagcatgaggtgggaactgccgcatccttttacgccatatgatcttgtgagaactcactatctcgagaacaatatggggaaaactgcccccatgatccagtcacctcccaccagatccctccctccacatgtggggattacaatttgagatgagatttgggtggggacacagagccaaaccatggaggccatggttcaggccaggggaatggcaggtggacatggcttggcaaattccagggacagaaaagcagccacacagggatgctcttcagaacaccgagtgtaccccagaccctaaagtgggcttagttgagacaggacggtgtcatcttcctctactccctgagcctgggttgcatgtggaggccattgctgggacccctgtgtgtacaaagctggtgtgatgaccagtccttgtgcccagagaagcatctccctgcagatgagagtaaccactcaccctgctgycgcttccctttgcaggtggcttgcggccaatgtggagctcctggggaatggcctggtgtttgcagctgccacgtgtgctgtgctgagcaaagcccacctcagtgctggcctcgtgggcttctctgtctctgctgccctccaggtactccccacatccccaaactgggcttgagggacagacagaggcagagactgtyggacccctgctagtgggacctttgaagaccctgtrtccaaaccmmcatggtgtgtggagtccctccaccaaggagggacacgcagctctacaagagccagactcagctaaggtgaacttgcaaccttgggcaagagtctttccttgtggagtgtcagtgtgctccttggaaagacaggccagaaatcccactacttctgatgttataaagactagttgagacaaagcatatcctgtggaggacatttctagtgcattgttaacttttgttttgttttgaagacagagtctctctcttttactcaggctggagtgcagtggtgcaatctcggctcactgagaactctgcctcctgggttcaagcgattcttatgcctcagcctcccaagttgctggaattacaggcgtgagccactatgcctggctaatttttgttaactattaacagtatgtaatgtcagttcatgacatctaygaaaaaaatatatatatacactcataagcatttgttatggaggaggcattattctaagagctttatatgtttttgttcgttttggtttgttgttgttgctgtttgagacaggatctcattttgttgcctaggcttgagtgcagtggcatgatcttggctcacttcagcctccatctccaggctcaagggattctcccacctcactttcccaattagctgggactacaagcatgcaccaccatgcctggctaattttttttttttttttttttttttttttttggtagaaacagtttcaccatgttgcccaacctggtctcaaactctaggttcaagtggtctgcctgccccagcctcccaaaatgctgagattataggtgtgagccaccatgcccagctgttttgttttgagacaaggtctcactcttttgcccagactggagtgcagtggtgtgatcacagctcactgcagccttcaattcctgggttcaaacaatcttcctgcttagacttccaaaaagctgggattataggcatgagccactgtgcacaagaattttataaatattaactcacttaatactgcccacaaccccatcagagaagcactgttattatcctcattttacagtcaaggctgctaagcttaaggatgaagtaagaggctggagcatgttgggtggcagtgagggaactttcctactgcatccagaaaggcctctctgaggaggtgacttaggaggaagtgaggttaacagcaggaagaaaaggcctgggagttgaaggttcatccctggtgtgttagaggaacagcaagaagaygggtgtggctggagagggtgggtgaaggcaggggtgctgggagacaaggttggggatgggatggcagggctagagctgctaatggctcatagggaggagcttggagtggttctaagtgtcatgggaaattggtggccacccagtcgctgcgagaaagccgtcagaatggaatcagtgggcctgggtcctgctgtgtgtccttgggagggccacacaccctctctgatcctgtctactcacctgcatcaagccagtttgtacaagctgatgtctgagggcttctttttgctctgcatgctctggttctactgaaggaagagagggacctgttggttgtatccaaatcccaatcccctgggcccaggtcctcagactrtcccattcctgcctcccctctttactcccctgggtctggcctcccagaaaaggttgggaaaccaggggggctgttgcaagccctcaagtggccttgccaaacccagccagagaggctttcttgcaccaggtgacccagacactgcagtgggttgttcgcaactggacagacctagagaacagcatcgtgtcagtggagcggatgcaggactatgcctggacgcccaaggaggtgatgggcgggaggtggggagggggtcccagcaaggacatattgtggggggggcaatgggtccctgttgacatctgctacaggctttggagtttataccctcttctcccctcactcaacccccaccactataggtcagagtcacagacagggtggcagcagtggttaggagcataaggtttggagccaggccaaatcttggttcctttgcttctgagcttgaggaaagcaggtcacccatgggagtgcagggaaccacaaggaacagcattgcaacagcaacatagctgcaacatgatagtaacataatggcaacagcaacacaatggcaatattccagaacatgagagtaatgcaacagcaatgtaacagtaatgtaacagcaacataaccacaatattgcagtaccagaatagcaacatagcagtgtaatagtaacataatagagacattatagtaacatgatggcaacattccagcaatacaaccacaacatagcaatgtaatagtaacgtaatagcaacattttagtaacatgatagaaacaaaacagcaacatagcaatgcaatagtaacacaacagcaacatcataacatgacagcaacatcccagcaacacgactgtaacagagtaacagagtagcaacataacaatgtaacagtaacaaaacagcaacattatagtaacatgatggcaacattccagcaaaataactgaaattatagtaacggaatagcaacatggcaatgtaacagtaagaaaacagcaacattatagtaacatgatggcaaaattccagcaacataacagtagcattataaggacagaacagcaacatagcaacgcaacggtaacaaaacagcaacatgatataatgtgttagcaatataacagtaacattacagtaacagaacaaggaagaattaattagttgatgaatagggtagaagaaatkgtgagagatggacagatgaatggatggaatgggatggaagaatgagagatggagggatgggattggagatggatggatggatgcatggatggatggatgggtgggatggggtggataaaggataagagatggatggatgaatggatggatgggattgrgtggaagaaaggataagaacagcagcatagcactaatgtaacagtaacataacagygttgagtttactgggaggatcaaatgagatcctgcaaagaaatgatttaatagagtgcctggtccattgcaaacactcaatacatgtctgctgctcttattagccctatttcccagattggaaaaccaagactcaagggggtagaatgatctgttcaaggtcacgggmacagcaaaggcagtattggtcttcccactgcacagtcatgtcctttcacaaagacaaagagaaatgtctgctcccactatagaaaaagagattattttatmataaacagtggctaataataacaataaaatagactaaaagtagccaccaccatctgtttttagcattgacatagtccatgccctctcttgttgaattcccataacaaccctgtaaaacagcaataaatacgtccattttgcggaagagaaaactgaagctgatagaggtgggccatcttgtgtgaagtcttagaggaaggctcctctgactcagtttcccctcctgctccaggctccctggaggctgcccacatgtgcagctcagcccccctggcctcagggcgggcagatcgagttccrggactttgggctaagataccgacctgagctcccgctggctgtgcagggcgtgtccttcaagatccacrcaggagagaaggtgagtggttctctcacaatgtcttcttcatggagtttaggccaaaggactccagggacaaggccctaaaccctgggcaccagcyacctccacagtgtccccacctcaggtcccctagctttcagacccattaccccctaaaatgaactcctcaccttccccaaacctgcttccatctggtgacttcctcatccaccttggtgtccccagatgaggaagcaactccgtgacttccttcttcctttaacattaacccagcacctaatatgtgctgggcagtgtgttaaatgctccaggtacattttccagtttgcacaaatgggatatttgctttcagctgggagacattgggaaaagcacttcatagctcagtctcagttttcccatctgtaaattgggactggtaatactgatctctgagttgttgtgaagtttgagttaatacatagaacatgcttagctcatagaaagtgctccagaaatgtttactaatgcttttattatttgcgttttcactctcacaacaacccctaagtgaggtgctagtactatcccattttacagatgcctcatcaggccccttcactgaatccctttcctccctccctctgaacctacagaggcttcctccctgtcctctccttgtcccctaaaaagcagtggatcctgtctcaccagctccaatctgctctcctgtgattttttttttttttttttttttgagacagagtctcactctgttgcccaggctggagtgcagtggtgtgaccttagatcactgcaacctccgcctcccagattcaagtgattctcctgcctcagcctcctgagtagctgggattacaggcacctgccaccacacccggctaatttttgtatttttagtagagacagggtttcaccatgttggccaggctgctatsaaacttctgacctcaatcacccccctcggcctcccaaagtgctgggactacaggcatgacccaccatgcccagccatcctgtgacctttatcagcatgaatgacactgcatgtcattcccctgctcaaaaccttctactagttccagcttcccttggggtaaagtgtgaattcctgagcttggcattcaaggctctacccaacccaggccctgccaacctccccctctcattcattgctctgccagggcttagccaacattgtggagcagctgcctctcggccaggggggcacatggtgctgtgagctccatgagcttctagttttggaaacccacttggtgtggtttacctggagtgttccccttccttgaactcctattgatccttcaagcttccatgcaagtatcccttcctccatgaggtcttctcttattacctctgtcaaatcccaggcagcatgagcagcactgccttgcttcccttaattgccagaggtccagaccttgataataaacagcattgttggctgggtgctgtggcttatacctgtaatcccagcactttaggaggccaaggtgggcagatcacttgaggccagaagtttgagaccagcctggccaacatggtgaaatcccgtgtctactaaaaatacaaaaattagccgagcatggtgacaggcacctgcagtcccagctactarggaggctgaggcaggagaattgcttgaacctgggaggtggaggttgcagtgagctgagatcgcaccactgcactccagcctgggcaatagagcaagactttatctcaaaaataaataaataaataaataaataawgcattgttcatcacactgtattacatttactcaattgcactgtttcctagaccggatgatgggcacactggagcaaggactctttaatttctatacttccggtgcctaaacaggtacttggcatacagtggggtgacccacatgtttccatcattaattaaacaaataatgttgaacccacaccatgtgtcagacactgaggatgcaatagtagcaagagagataaggatggagggtggataacagcatgggagatggataacagaatggacacatggataagatggaggatgaatggaaggatggatgagggaaggatggactggatggatggatgggagaaaataaatgaatgaaaggattagtgaattgatggatgaatagggaagaagaaacgagagacggatagacagatgaatggatggatgaatggaatggggtggaagagagatggagggatgggattgaggatggatgatggatggatggatggcaggatggggtggaaaaaaggataagggatggatggacggacagacagatggatgggatggggtagaaaaaaggatgasagatgatggagaggtgtaaatagaaggatgaggaaagatggaggaactaaaggaagggtggggagaaagatgggagagagatatcaggataagggaaagatagagaagaacacagatggaagactggatggattgatgggtggatatatagaaaggtagacagatggaaagagagatggaaggtagacctttacacaatgagggatggatagacagatctcgggtacagcagaaagatctccccaataaatgcccacaaaccctctggtcagagcaggcctttcctcccaaccccgggcaggtgggcatckttggcaggaycrgggcagggaagtcctccctggccagtgggctgctgyrgctccaggaggcagctgagrgtgggatctggatcgacggggtccccattgcccacgtggggctgcacacactgcgctccaggatcagcatcatcccccasgtgaggctggtggagggggtgggcaaagatgggaggcatggtgggaccyggctctgacccaccgcccctccccgccaggaccccatcctgttccctsgctctctgcggatgaacctcracctgctgcaggagcactcggacgaggctatctgggcagccctggagacggtgcagctcaaagccttggtggccagcctgcccggccagctgcagtacaagtgtgctgacygaggcgaggacctgaggtatggtcgtcccaccatggctgggacctgcaggtgggagaggaggggatggccatgccctccccaagggccttcaggaaatgcctcccccgataggattatcactctgttacattaataaccacatgtctcttatctgcaattccaagctctgacacagtctctgaataccaaggttttcccccctaaattagcagttagtcttctatatttacttggtggcaaaacccaacctcaactgacacagggctactgatagcctttattgctcttgctcagtatttattttgctatgaaaatattgtttgatatcgggtggtaacctcaccactcactgggactataatataggatttttttttttggtaaatgtcaagtgtggactgggcacagtggctcatgcctgtaatcccagcacttcaggaggctgagagaggaggattgcttgagcccaggagttcgagactagtctgggcaacatagcaagaccctatctctgtggacaacagtattagccaggtatggtggcatgcacctgtagtcctagttacttgggaggctgaggtgggaagaacgcttgagccagggaggcgaaggttgcagtgagccgatattgcaccactgcactccatcctgggcttcgtctcaacaacaaaaagctgtgtggaaagatacacataaaatttactatctcaacctttttttttttttttctttttctttggagacagggtctggctctgtcattcaggctagagtgcagtggtgaggtcaaggctcgctgcaacctccacctcccaggctcaagcattcctcccacctcagcctcccgagtagctggggttacaggtgtgagccaccagggccaggtaatctttttattttttgtagagacagggtttcaccatgttgcccaggctacagtcgaacttgcgtaggcctcccaaagtgctgggattacaggtgtgagcagccacgccgggcccatctcacccatttttcagtgtatagttwctgtagtgttaggtacattcacactgttacacaacagaactacaactctgtacccatgaaaccctaactctccttgtcccctcccccagcgcccagccaccagcattctcctgtctctctgagtgtgactactctagacactgcatagacgcagaatcataggatctgtccttttgtgactggcttatttcacacagcatgatgtcttcaagggtcatccacatcgtagcatgtgtcagattctctacctttttaaggccgaataattttccactacatggatagaccacattttgcttatccgtttatctgccagtagatacccaggctgtttccacctcttggccgttttgaataatgccactatgaacataggtgtataggtatatgcctttagaaaaaccaaagtggctgggcgcggtggctcatgcctgtaatcctagcactatgggaggccgaggcgggtggatcacctgaggtcaggagttcaagaccagcctgaccaatatggtgaagccccgtctctactaaaaatacaaaaattagctgggtgtggcggcaggcgcctgtaatcccagttacgtgggaggctaagacactgagacaggagaatcgcttgaacccgggaggcagaggtttcagtgagccaagattgtgccactgcactccagcctgggtgacagagtaagactccgtctcaaaaaaaammaaaaaaaacctaaggtgttctggatttataaacccctctgaccctgagggtgtccgaagggcttgtggtaggcaataatttccagcactagagaggcagcgttgcttggtgggtaagagtatacacaggtgacagactgcctgggctcaaatccaggccccccaccccacacccccacccccgccccgccctgccacttactagctgtaggatcttaggcaacttatcttgtgtgcctcagtttcctcatctgtaaggtgggaataatagcacctacctaccttgcaaggattgaattatatgcacaaagttgttgaaacagtggcaggcatagagcaaagagtaaatactcattttagtcctgagtcacactcctgataacatcatttcacagagttggaattggaggcctggggcttgcctgacgtcacacagcttaaaagtagtgaggttgggacaagacccaggcactctaacgcctgcatgaccatagtaggttctgatcatgtaaaaggatgctgtttcatggaagggcttactgtgcaagacagccatgctggggccccaggggtcagttcccacctgggtcaggggctcmctgggctcacaacctggaatctcaactcctccaccctccacgaagggtgctactccatgccaagggcttattctgtgacaagccyacacactttttttttttttttttttttttttgagacagagtcttgctctgtcgcccaggctggagtgcagtggcgcgatcttggctcacttgcaagctctgcctcccgggttcacaccattcttctgcctcagcctcctgagtacctgggactacaagcgcccgccaccacgcccggctaattttttgtatttttagtacatacagggtttcaccgtgttagccaggatggtctcgatctcctgatctcgtgatccgcccacctcagcctcccaaagtgctgggattacaggtgtgagccgccgtgccccgccacccacacacttttatgtgccatgtcgtcacgattcagcgaggacggatccattaggagcacagactctggggtcagaggacttgggttcaaattatggacccaccactagccttgagaccttggtcaagccactgagcttctctgtatctgtgtcctcttctctcaaaagaagagaacaataatatctaccttggtggacattatgaggattgagtgaatatatacaagcacttagaatgtgtttggcacaaggtggaaactagaaatagaactggacatagccataaacaggccaggcacggtggatcacgcctggaatcccacccaggtgttgtacacatctgtatttaaggcccacgtgacaccagccttgaatgtcttargaagactgtagatttgattcttgaagcagcagtgagtcattgtaggtttgtttgcaacggcatgactgaagtgaaagctgtgctttcgctgttgggggaaatataaattagtacagtcactatggaaaatagtatgatgatttctcaaaaaacaaactagaaatagaactaccggggcgcagtggctcacgcctgtaatcccagcactttgggaggctgaggtaggtggatcacctgagagtttcaaacaagtcggacsaacatggtgaaaccccatctctactttaaaaatacaaaagccaggcatggtggcgcatgactgtaattccagctacttgggaggctgaggcaggaaaactgcttgaaccgggaggcagaagttgcagcgagctgagattgtgccattgcacgccagcctgggtggcagagcaagactccgtctcaaaaaaaaaaagaaaaacgaagaagaaaaaaagagccataaacagaaaaaagaaaatagccatttcacaggtggggaaactgaggcacaaagggtttgaatgacctgcctacagtcagcctgctcaaagatggcaggaacaggcttcctatcagttctgcagaccacagaccccagaccccatgtgtggggatgcctgaacacaggcacctcactcctgcactgcttcagggacctgtttctgggcacacccacacatcaccatgtgccgacaaacrcacgtcccagctaattgtcccaatcgttcccagcgtgggccagaaacagctcctgtgtctggcacgtgcccttctccgraagacccagatcctcaycctggacgaggctactgctgccgtggaccctggcacggagctgcagatgcaggccatgctcgggagctggtttgcacagtgcactgtgctgctcattgcccaccgcctgcgctccgtgatggactgtgcccggtaaggctcccgccccggcctgacctcacagcagccctgcagtggtgggggaaggaggcggaggcagtcctgggccactgggcttcgggttagagctggaggggtcctgaatggggccagagcgggaggaatgcccgggaacacatgccaagtgggaaagctgcccaaggacatgcgcccagcacacgcttccaacccagctgtgagggccagggagccgcatggaaagcaggacttctatggagaaaacctcagcgcagrcacactgggctctcacagctgccgagagcctgggctggtgtccaragagcctctctgtctccctctcccccacagggttctggtcatggacaaggggcaggtggcagagagcggcagcccggcccagctgctggcccagaagggcctgttttacagactggcccaggagtcaggcctggtctgagccaggaccctcaaccrtaccccagttggaccagcccgcacagcctgcagtgctggagatggaagtgacccgtggtcatcgatagctccacacgatattgagtctagacctgtgtttgctctctgggaggaaaatggcagagaaagtggccaattatcacagagcatcagagccggaaggacctagcaatacacaggtctgcccgggcagggcccatctcgccctgtccaccctgcagccaatgtcaacagcgactctcagccccgctgtactctggactcacctgggggcctcaagcacatgcccaggctcccrgctagacccttaaatcagaatctctgaggctgggaactgccatgctgtgtgtactttttacaaattaacacttttattttgggataatcccagactcacatgcagttaaagaaacaataatatagagagattcgtgtacttggtaccccatttcacccaatggtaacatcttgcaaaactctaggataaagcatcacagccagggtgttgacattgacacaacaatcttgctcgatttcccgttttacctgtactcctgtgtgtgtgtgtgtttattttgtcccatgcagttttatcacacatgtaggctcatgaatccacaccagggtgaggatacggaatagccaccaccattttccgaccacacccatcactctcgctcctgcccccagtgaccatgctctgttctccagttgtgtgtgtgtgtgtgtgtgtgtgtgtgtgtgtattttttttttttttttttttgagacagagtctcactctgttgctcaggctgaagtgcagtggctcaatctcagctcactgcaacctccacatcctgggttcaagcaattctcctgcctcagcctcccgtgcagctgagattacaggcgtgcgccaccatgcctggctaacttgtgtaatttttattagatacgaggtttcagcatattggccaggctggtcttgaactcctggcctcatgtgatccaccctcctcggcctcccaaagtgttgggataacaggcgtgagctaccgcacctggccgagtttggtgtataattttaaagctcccccataggattccaatgtgcggccaggactgagaactacagccctcgcatctcctgctgctcctcctcccccaccagagatgagctccaaggacacaaaaaccaggtgcccccccatgccaagcatgggtcctctccacgcatgagaaagtcaaatatgcaagtttggtttccaaaacaaacaacagaggagccaagacttcacagccctcaatgggagaatttgcccgaggacttggttcttttttttttttttttttttttgtccgagacaaagtctcactctgtcacccaagccggagtgcaggggtgcaatcttgactcactgcaacctccacctcccgggctcaagcgattctcccacctcagcctctggagcagctgggattacaggcgcccaccaccacgcccagctgatttttgtatttttagtagagacggggtttcaccatgttggccaggctggtctcaaactcctgacctcaggtgatccgctggccttagcttcccaaagtgctgggattacaggcgtgagatactgtggctggcgggttcatttcctatatgtggttgctaaaaaccaaattccagctccctgggggcgccccagcacccgtcggaacacctggagtgtttctgttcacagttccgctccagatgctgctgacagccaaaggctggacccggctgagcgtggagaacttgctgtaaccaagggtggtcaatgcacagcttgttgcattcctcacacatttctttttttgttttttgagacagagtcttactctgtcacctaggctaaagtgcagtggcaagatctcggctcactgcaacctctgcctcccaggttcaagcgattctcctgctacagcctgccgggtagctgggattataggcacccaccaccacacctggctaattatttttgtatttttactagagacggggtttcaccatgttggccaggttggtcttgaactcctgacctcaggtgatctgcccacctcggcctccaaaagtgctgggattacaggcgtgaaccatcatgcccagcctcctcactcctctttctgacagcggtcagtatattaatactggactcaccaaaccagctgcaggcaccggaaaagagggactaagtctaaagtagccaagcctaaggccacacatagatcgctgggaagggcagcgtgagacattagacaactccctagatcctaacattatgtatgctagtcagggagtctcactgacctcgtggcattgccgcaagaatgacataatacatggatatgtgttcgtggaagcacagaaggcaatcccccaggctttctgaaccttattgacacgtggggccagatagttctgtgctgtggggacatgtcctgcacatcgtaggacgttcagcagcgcccctggcctcttcttcactagatgccaataacatcctccttctaccgccaccagacttgtgacactgccattaatcccccagggggtcaaagccacctagttgggccgggtgcagtggctcatgcctgtaatcccagtgctttgggaggcggaggcaggtgaatcacttgaggtcaggagttcgagaccagcctggacaacaaggtgaacccctggctctaccagacatacaaaaattagccgggtgtggtagcaggtgcctataatcccagctactctgaaggctgaggcaggagaatcgcctgaacccaggcagagaaggttgcagtgagccaagatcacaccactgcactccaggctgggtgacagagcaagactgtctgaaaaaacacaaaacaaaaagacccacttggttgagaatccccggtctaacctgccccgctgccatccatcatccacagatacttgagcagtggctttgctggtgtcaggggtggcagggcaagaactccaccttttcttaaggacacagggcctgctccgcccatcaggtcatgggactttctgatggcccatcctcacaggttttgtgatgccccttttggcctggagtaaacttctaactgcagcttctaccaccttcaaagtggggcaggaagtccgcattcttgacctgcccctagtcatgcctgcaaagctgtggacccacaactacctattcctagctccatttcacaggtgaggaaactgaggctcaaggggttgacatgacttgccaagttgacccagtcagtaaggacagagtggggatctgtttctgggtgtaataccaaagtcattgcacagggcacatttgtcctttagagaaaggaagggcggcagatgcagcctgtcttctctggctggagctgagccacctgccttgcagagtgaccctaggcaggggctgccatgtgggcatttggcaaactcagctggggatgacccagggccaccagactctctttcctaggctgtgtgccagggagcagagggtgggccacaggcggccagcacgtgggaaccggcacctgccagcctgctaacgagactgctgttgggcccacaccacggcagtctggagacgcgccagaggggatgcccaggccattaatacccccgccatgggctgctgccagtagggtctggctggtgggtggaacacgaatttcatccatcaaggctgcagacttcctctctggtcagtgcctgcgcccagtagactctttaaaactcaacagtccacctcgccactgcaaacacgtaactacgtatacctgacactgctttaaatgcccgccacgcacgcattcagtggaccagaggaggaagccacctcactgggccccttactggaacgttttgatgaggaaggtactaccatcaggcccttttgacagatgagaaaacaaacagaatgagtggcatctctgcccaagcagtgtggcttcagagcccgtgtcctcaccatcagtcactcactctgtcacccaggctggagtgcagtggcgtgatcttggctcactgcaacctccacctcccagttcaagcaattcttatgcctcagtctcccaagtagctggaattacaggcactcgccaccacacctggctaatttttgtatttttagtagagacaggatttcaccatgttggccaggctggtctcgaactcctgacctcaggtgatctgcctgcctcggcctcccaaagtgctgggatgacaggcgtgagccaccgtgcccggccagtgcgtgttttcataaggtcactacagccaccaggttgaggacactgatgtgtgtgtggggggctgggggcaaaagcctcgagaccactgtggcagctgttgtagggatgcagggagaaagtggggtggctgggaccagcgtggtggcaatgggaggatggggagtggatagattctgggtgttttgcagaaaatcaaacaaatttgctgtaggacccgatggtgggtgtgaggacagatgaacagttcaacactggaaagcaccagccccctccttacgcctctctggtctggggggatcctttccaatgtggagagttctgcacagtgaggccagggccagcacgtagtaggtacaaaacagagcttccttccacagtacttccactcccctggatgaggagttatgcctcactctgcctcctcttcataaagtggattaaacttgaactcagccccggattccacctgagcatgcagctgccccaccccaagacactggcacagatgcacaccaggtggagctctctgggactgcttaggatctgacctgggattttaagactcagggtcaggctttgagatctaaacacatctcacatccctattaagattcccgctggtagatccaactactactcttttgaaatggagtctcggcttgctctgttgcccaggctggagtgcaatgacttgatttcagcccactgcaacctttatctcccacattcaagcaattctcctgtcagcctccccagtagctgggactacaggcatgtgccaccatgcccaactaatttttgtgtttttagtagagacggggtttcaccatgttgatcaggctggtcttgaactcctgacctcaggcaatccacccgcctcagcctcccaaagtcctgggattacaggcgtcagccactgcacccagcctcaactacttctaatttaacaaaaaaaaagtttttatatagaaagagttccactatgttgcctaggctggttttgaactcttcagctcaagcagtcctcctgtctcagcctctcaaagtgctgggattacaggcatgagccacctcgtctagccaatactgctaattctaatagtcacaacgtyaccagtttttcactgggcaccttcatactctgtggttcctaatgcaagccaatgacatcattcaggcatgagccaccatgcccggctggctgatactacctattctaatggttatgaccttactggcttttcactaggcaccttcacactctgcagtccctaatgcaagccaacagtttcaatggggcatgagtcactgcacccagacactactactcattctaatggtcaccacctcgccggctcttccctgagcacctttgtacaccacagtccctagtgcaagccaacaatttcaatcaggggacaggaaagcttgagggaacaatggcagtgctagaacgttctatctgcacatgtacttggtgcatggttttaggtgtggcagaaatggtgtgctccccaaatacagacattccttactgcccagactcacccagttcgaagttagaaaccgaacacactagtctgactactccgctatccaaaactccagaaccacatcagttaggaaagggagaaatccttctcttccacaggcaccgctccatttcccagctcccgcagtggttgggttggggccatgtgactcattttggccaatgggctgtgagtgggattaactgcgtcagttccggtttcagacacagaagagtgggtgagagtcgtccactctcccttctcccactgtggggacctggaggccaacccttgggaggccatgtcacaaaaccaggacagcctggatcacttgtcacagggaagtcacctaccctggagaggcagctgaccctcaccaagaactgcgtgagcaagaaataaagccttgtgatcatttccgaagattttacggcgaatttgttactgcagcgcagcctcgcctctctggactaacataaagggattttcaggccaggtgcctgaaccccagcactttgggaggctcaggcaggaggatccccagagcccaggagtttaagaacaacctgggtaacatagcaagaccctgactctataaaaatttttaaaaattagctgggcacatgcctgtagtcccagctacccaggaggctgaggcaggaagattgcgtaagcccaggagtttgaggctgcagtgagctatgatcgtgccactgcacaccagcctgggcaacagagtg

SEQ ID NO: 8813 - DNA, 88116 bp, Homo sapiens
attgccaaacgagaatattttgcccaaaaaaatccttactgggaggttatttcaataggcaatccccattacgtggggattaacacatccctgtaaacatccctgtagacgggtattgtggagggcaggatcagacatgtagctgaagaatcctttgtgcctgtatttaattttccagaaggcagatgacaagcacacatcctctccctgcgtaggtatttattactgctgactaaatcttgactgtgggctgggcgcagtggctcaggcctgtattcccaatactttgagaggctacggagggaggatctcttgagcctacaaatttgagactagactgggaaacggtgaaaccctatcactatttagaaaagaaagaaaaagaaaaaaatcttcattatgtctgtgtataggtagtattttccaagtggagattagaatagatgaaaaacccgtttctagcgttttggcttttttcaaagtaccaaacaaatacgctactcttcagaggtgttttttccccattttatttcagttgagtatgtttcaacacaagccatattaactaaaaatcttaagaaacaaggtaattgtaggtttctaattgctttttttaaaaaatagtttttagccagaaaacatcaaagaatgcagacacatttcctttttactttttttttttttttttttgagacaaagtcttgcttcattgcccaggctggagtgcagtggcaggatcttggctcactgcagcctccacctcccgggttcaaccgattctcatgcctcagcctcctgagtagctaggattacaggcgcccaccaccatgcctggctaatttttgtgtttttagtagagacgggatattgccatgttggccaggctggtctcgaactcctagcctcaagtgatcctcccgcctcggcctctttaggattacagggctgagccaacgagcttgaccacattttctttatatgtatatttttcttttagattcctttttaccaagcagacacattttgtttgacttagcttggcattctttcaagtccaaagctgtaactagtcacaacaagtaaatgtagtgattgaaaatgggcggggcatggtgactcatgtcgtaatcccagcactttgggaggctgagacaggaggaccccttgaggcttggtgtttaaaaccagcctgagcaacatggtgtgacacttgtctctattaaaaaaatttttaaaaacaaaacagtcgtattaagtggaaggctaataaaagtctgaattacaaatacttttaaaagaaatgtaattttattgctgctttctaaagactaggagcctaagcaaagtataccaggccttaggagacaattatgaatcaaaatacataaattttctcttaagatatattttaagtatgtatcctctattaattgtattcctgtttctttgctgggaaaactttagagagtacaagtaactttcagtttttcccttgtccaaattatagtcttcacatgtatgaaaaccgaaagacttttttgtgtgctatttaagtagctactttacatgcaattcagcttttcaactaaccaagctgttattaaaggagtttctccccagaaaccaatcttctacctgtattaggttcagtggtttgaattaataaatgatcatggaaggacctaaggaagttaaattgagttatctgctcagccatagtccaaagctacaaggaaaacaaattgaatttaaaaagaacaagaaaaacattttaaatgtttttaaggttttacccaatgacaaacctatttccctaaatgttgttcccaaataggactttaaggattattatttcaatgccctctcttttttctttatggaaaatttgggaaattgagaaccaactagtttaaataccttgatcaaagccatttaggcaacaccagtacctcatcagtttgtgcttcggtttctctgtaagctgaggtgattagttcctgtccagaaacgtcacagagtggttagggccaaataaaattccgaggggggccaggcgcagtggctcacgcctgtaatcccagcactttgggaggccgaggcaggtggatcacttgaggtcaggagttcgagaccagcctggccaaaccaacatggtgaaaccctgtgtctactaaaactacaaaattagctggacgtggtggtgcacacctgaaatcccagctactcaggaatctgaggcaggagaatcgcttgaacccaggaggaagaggttgcggtgagccgagatcgtgccactgcactccagcctgggcaacagaacgagactccgtcaaaaaaaagaaaaaaaaaatccaaggggggttaataccagctacttggtaggctgaggcaggagaatcgcttgaactggaaggtggaggttacaatgagccgagatcgcaccactgcactctagcctgggcgacagagtgagattccatcttaatgaataagtaaataagtaataaaattcctaaggggaggcttggtgtggtggctcatgcctgtaatcccagcacttttggaggctgaggcgggtggagcacttgaggtcaggagttcaaaaccagcctggccaacatggtgaaaccctgcctctactaaaatagaaaaattaggtgggcatggtggtgaacacctgtaatcccagctagtcgaaaggctgaggcaggagaatcgcttgaacccgggaggtggaggttgcagtgagccgagattgcagcactgcactctagcctgggcaacagagtgaaactctgtctcgaaataaaataaaattccaagggggaaggcatcagacgtagtaaagtgtgaagcagcatgtaaatgattcattaatgtttgggaagtttcctgaaagacatttggtactttccttaaacctgttgataggtggtggggttcccctttgtgcctctaagcagtttttaggaattagcaaggagttcaaagtagaatttgagaaaggctgttgtaggatagcaggaaggcaagatggggtgggagatcctgtaatagctaagatctctttgcctctagcatagtgctgaagaaggagggtttaggagtcagagccagctctgaagcctgatttgttaattactagttgtaagacctcggacaactcaattaacttcctgcacctttattttcttatctttaacatggatacaatttaatgctttcctgtggttcatcacctgtggttcagttgcatggtctcctctctacagtggccttccctgactatagcatctgaagtgacccctcccagcccgttgtatcaaatgggcttgccttagtcatagcacttatcagtatctgaaatgacgttactttttctgcttatagatttagtatgtttctctcttaacaatataagccctttgaggacaggtactttgtctgactgtattcactgtgctgtaagggtgcattgtacagaagaatgctcataatgccgggtgctgtggttcatgcctataatcccagcactttgggagggaggctgaggcaggaggatcacttgagcccaggagttcaagaccagcctgggcaacatagtgagatccacgtctctacaaaaaaatgtaaaaattagctgggcgtgttggtgcacacctgtggtcctagctactccggaggatgaggtgggaggatcacttgagcctgggaggtccaggatgcagtgagctttgattatgccactgcactccagcctatgtcacagggtgagactctgtctcacaaaaaaaaaaaaaagctggataataatatatatatttttagtttttatgggtacactgtaggtgtttatatttatggggtacatgagatattttgataacaggcatgcaatgcatcataatcacatcagggtaaatgggtgtccatgacctcaagcatttatcctttctttgtgttacaagcactccaattatactcctttagttattttaaaatgtacaatacattgttgtggactgtagtcaccctgctgtgctcccaaatactagatcttattcattctaactctatttttgtacccactaaccagaatgttcggtatttgttaatgaacatgttatgacaggatgttttagaagaaaataaagaaaaaaagaaattccagccaagcatggtggcttgattttatttatttatttattttgagatgaagtctccctctgtctcccaggctggaatgcagtggcgtgatctccactcaccgcaacctctgccttctgagttacatggctcacgcctgtaatcccagcactttgggagactgaggtgtattgcttgaggtcaggagttcgagaccagcctggccaacacagtgaaaccgtgtctctactaaaaatacaaaaaattagctgggcgtaatggtgggcgcctgtaatcccagctactagggagactaagacaagaaaatcgcttgaatctgggaggcagaggttgcagtgagccgagatcgcaccattgcacgccagcctgggcaacaagagggaaactctgtctcgaaaagaaaaaaattattttttaattttaatttgttagtgaacaattagggttgctgtgagaattgtgcctggcacacacagccatttaaaaatcacgatcttcaggcagtgtgtggtggctcacgcctgtaatcccaggactttgggaggccgaggtgggtggatcacctgaggacagggattcgagagcagcctggccaacatggtgaaaccccgtctctactaaaaatataaaaattagccgggtgtggtgatgcgggcctgtgatcccagctactcgggaggctgaagcaggagaattgcttgaactcagaaggcagaggttgcagtgagtggagatcacgccactgcattccagcctgggagacagagggagatttcatctcaaaataaataaataaacaaaatcaagatcatttaacaaatacatatattgtacttactaagttcaaatttctgttctaaacgtttttacaaatgctgttaagtcatttagtcctctgcataatgtcgtttgtttgtttgtctgttctttaagacggagtcttgccctgtcgcctaggctagagtgcagtggtgtgatctcggctcactgcaaccgccacctcctggtttcccgtgattctcctgcctcagcctcctgagtagctgggattacaggtgcgtgccaccacatccggctaattttttgtatctttagtagagacggggtttcaccatgtgccaggctggtcttgaactcctgacctcgtgatccacccgccttggcctcccaaagtgctgggattacaggcgtgaccaccgcgccagacccataatggcgttttatagatggggaaacggagtcatagaggctaaacaactttcccaagaccacacagttagtaaggggcaggactaggactcaaagccaagtttatgaccaaattctggtgcactacgttctcctgcttctggagaagataatgatgctgaagattctacttttggtgtaaaggagtaggaagggcacggggcactgctagcttcagtgggcctgaatctttgtctttccttctgatttggagaaagtgcaagaatgggaaaatgcaatcgaagtgaaggagaggccggcgtattttcctgaaatgcgcggcccgcaagcccaaacccgtttcccgggtgtccaggcagcgttctgcagcatctccaatgcccgccagcccgccgcagcccagcgcccggcagccggcgcctctcaaaccccctccggccaggagccttcgccgcttggccgcgccgcgcccggcctgggaaaaaagtttccaaacgacgctgctctgcgctgattggccgaggcggacgcggtaccgtagagcagcagccaatgggaggcgccgaccgcaggctccggggcgggggcggggtccggagggccggggccgcaccgcccttcgcagccgcctctgccgccgccgccgcgttggcctcgccgcccctgctcgggtaagtgaggcgctgcgcggggctggggtcggggtggctgtccggggacctccaccgcggctgaaaagctcctctgccccgccccaggatcccgggaccccgggccaccgcctggcagggacccctacgcccctcgcttgcgcgtcgcttcccggccgcctggactcccccggtccctgggctccaaaatcccgcctccctggagcctcccgtcctaaaaagttaggcactgagtgccttgccaccggtgcgttcctcgcgctggcccctcgcccttggcaactttgtttctctttctgcgttggtctctctcccaccccgttgccctcttctccttccgggacttcctgggtggttaagccttgccggtccccaaaccccgctgccaggctccatcctctttctcctcttccttcctccccatactcctctcctagatgaccctcgtttcttttctctctctctcctattcctccatcctgccacccscttctctgcgaccccagacccctcgattgcagcgttgcccctgccctcacacccactgtcccgcccctgcaggcctctttccaaaaacccaccctgctccctccctccgggaacacgtttggggcagtctgctctccgctttgctcccgtctctgccgcaggacggttcaggtttcttctgacagcactttggggagggattgggtaaaggacgaaaatgcttattccgcagcttgagtgatggctgggctcactgaggacctgagtctctgaggtcctgggaaaccccgctgtcaccttgacaccgcttttggggaggcgactttatcttctccgagccatctcaggctttctgcctcctgagggcctgagcttccttgattgctttgtccgtggttactaccaggttgtgcctcttaatttctactttgagcctcaggccccttttaactttctaaagaaaaggcctttgcagcacgacctaggcaggttcatcatttttagttttgttatagtgtattctagcataggatggcattttaggacatgggtcgggtgttttgaagattaattagatcccagctactcctaaagcctcttgttacccgaccaccccagcctccatcacctcgttggtatacaacccgttttttttttkttttttttgtttttgtttttgagacagagtctcactctcgcccaggttggagtgcagtggtgcgattttggctcactgcaacctccgcttcccgggttcaagcgattctcctgcctcagcctccggagtagctgggactacaggtgcgtgccaccacgcctggctaattttttgtatttttagtagagatggggtttcaccgtgttagccaggatggtctcgatttcctgacctcgtgatctgccccctcggcctcccaaagtgctgggattacaggcgtgagccaccgtgccggcctacaacccattttgagcctttcctcttagtgtgtgttttgtgtaggattaaatgcagatgatctgtgccgctgaagtctcaggggcctgtgattcatatattttatcccatgttggataacagtttattaacttgacttatttttgtttccaaagtgtgttatttattatttatttatttatttattttgagacggagtcttgttcttgtccaggctggagtgcagtggcatgatctcgactcactgcaacctcagtcctccgggttcaagtgattcttctgcctcaccctcctgagtagctgggattacaggtgcgtgccaccatgcccggctaattcttagtagagatggggtttcaccatattggccaggctggtctcaaacttctgacctcgtgatctgcccacctcagcctcccaaagtgttgggattacaggcatgagccactgcacccgactctatcattattattattttttatgtagaggcagaatcttgctttgttgcccaggctggtctcaaattcctgggctcaagcagtcctcctgccttggcctcccacagtgctgagattacttgcaggcatgagccactgcatgcagcccaaagtgtgttcttttgccttagaatgtgagccgagaattgacactccttttcctcacaaggtaatttcctaacatgagcattcctgtgtacagaaagtttgtgcctgcagttagtactacacgtgcacctcgtgcaatggatgtgggtgctttttgtctgcctccttcagcagtgcccagcacttagtaggtattcaagaaatgtttgaaaagggttggaggaggcaaaaccacagtaggaaaaattctttccctgtcacttggttcagtagaataaaattatcctggaacaatagctattttactttttgtccaagtttttgtttgtttgttttttgagacgggatctcactctgtcgcccaagctggaacacagtgatgcaatcacagctcactgcagtctcgacctctcaggctcaagcaatcctcttgcctgagcctcccaagtagctgggactaaaagcacatgccaccatgcttggctaatttttaaaattttttgtagagattggggtctcactatgttgcccaggctggtctcgaactcctgggttcaagcgatccttccgcctcagcctcccaacgtgccggggtgggagagagccaccgcgcctggcctaagctttttaaaatctctaaagcgatctatgcttactgtatatatgtgtatgtagtttaccttaaagcaaggtgtcaggtacaaatccacagggcttgctttacccccattctggtgcatcctccagacccttttctattctgtgtacagagagagggaaataaacaaaaatgggcacccatttttaacatatcctgagctttcttccatattagtacttacagttcttaacaactgcatcgttttccattcagtcctctgttgacattgaggtttccagttttccacattmgtgaatgatggtgtgcatctttgaacatgggtccttgcctgcctaagtatttttgtaggttgatcattgtaaacttggaaagcacaaagacagaagccaggcttgctgactcttgactgatgttgccccagtgatgtcactcctgcaaaatgcaaagcctgcgtcctggctgtcggagcatgtgtggacatttggcagcttctttctcttccctcctgctcttctgtttgttttgattgggaaggatatggagtggggatggagaagggtgttgagtaattatcgatggtttctgtatgtttattgctcctgactagcagtgctgggtttcttctctcagaggaaagctgaaagagattgctttgcttttttccagagttttaaaatcagaggtgtgtgtctcgagtgtattttcagacttttttgttagctttaatcatgtaaaacatgcaaaaaaaaaaaaagcatgtggaaacaattttttttttttgagacgggttctcgctctgtcacacaggctggagtgctgtggggcgatctcggctcactgcaaccaccgcctcccatgctcaagtgatcctcccacctcagcctcctgagtagctgggaccacaggtgtgcatcaccacacctggctaatttttttgtgtttttggtagagatggggtttcaccatgttgcccaggctggtctcttatctgctgacctcaggtgatctgcctgcctcaccctcccaaagtgctgggattacaggcatgagccaccacacccggccggaaacaaatttttgaaggaggcatagatctctgttgtgcaaaatagatactttttgtaccactgggtcctagtttgtcattgttccttgcatgatcccatcagatttgtctacagagctgctggggcatgatggtgtggtggcgtattaagaacgcaggttagtggcacacagatgaaataaatgcatgtggggtgcatttttaagatagcaggtgcaaagttgtatatactgagaccaggcattaacacttgcctattacagtgccttttaaaacactatgtgagggccgggtgcaatggctcacacctgtaatcccagcactttgggaggcctaggtgggcagatcacctgaggtcaggagatcgagaccagcctggccaacgtggcgaaaccccgtctctcctaaaaatacaaaaaattagccagtcgtggtggcatgcacctgtaatccgaggtactagggacgctgaggtaggagaatcgcttgaagctgcgaggcagaggttgcagtgagctgagatcacaccactgcactccagcctgggcaacagagaaagagattccgactcaaaaaaaaaaaaaacaaaaaaaaaaaaaacaaaactggaccaaatgaaacaagtgaatctgatctgcagtcagtcagtttgcaacccctgggaagccttggacttgaatgcaaagatcccttgaacttggatctagtttgcctctgctgctcacatgcacatttagagatggccaaggcatacggtgtttctgcttccaagaaacagagtggttgtcctgtttagccatctcttacagtcacacagcttaaagaagataatgtttgcaaacaatttttgaaatgtctagcacacagcaaacagaaggtcaaattcagtacttaatgctgataaaataagagaacccttgcaagtcatgttgcctgctttctgccacagagagtactgcaatagaactttctgacgttttcatgttgtttatttatttattttttgagacagagtcttgctcttgtgcccaggctggagtgcagtggtacaatttctgctcactgcaacctctgcctctgggttcaagcaattcttgggcctcagccacccaagtagctggaattataggtgcgctctaccacacctggctaatttttgtgtttctagtagagacagggtttcaccatgttgcccaggctggtcttgaacccctgggctcaagcaatccacccacctcagcctcccaaagtgctgggactacaggcgtgcatcgtgacgccctgctgatttgtgtatttttagtagagacggggttcaccttgtgctggtctcaaactcctgggctcaagcaatctgcccacctcagtctgccaaagtgctgggattacaggcgtgagccatcgtgcccggcctctctctgacatttttgaatggcaaaggcaaaaatcttatacttttaaggatgtggagaaataggaacacttttacactgttggtgggactgtaaactagttcaaccattgtagaagtcagtgtggtgattcctcagggatctagaactggaaataccatttgacccagccatcgcattactgggtatatacccaaaggactataaatcatgcttctataaagacacatgcacacgtatgtttattgcggcattattcacaatagcaaagacttggaaccaacccaaatgtccagcaatgatagactggattaagaaaacgtggcacatatacaccatggaatactatgcagccataaaaaatgatgagttcatgtcctttgtagggacatggatgaaattggaaatcatcattctcagtaaactattgcaagaacaaaaaaccaaacaccgcatattctcactcataggtgggaattgaacaacgagaacacatggacacaggaaggggaacatcacactctggggactgttgtggggtggggggaggggggagggatagcattgggagatatacctaatgctagatgacgagttagtgggtgcagcacaccagcatggcacatgtatacatatgtaactaacctgcacattgtgcacatgtaccctaaaacttaaagtataataataataaagaaaaagaaaaaaaaagattgctgttttatgataaagtgaagtgcagctgttacttcttccttctttgcttccagcatctctcttccctaaggattgcttttaaaatgtaagagtttttggttgaaatgctgttcctgtggtttttgtctcttggttggagtgaaagattttgcaggctgtgatacaaatccagttctctgcttattttctcctcagtccttgaaatccaaaaccagatccctcccattggcccgttgtaattagaacctgccccacaatagacgcacctcctaaagcatctcagattcatttctttcctgaggattaagtttttaaaccttcctggccaagataacagtgttttaagaggctcttttcttttwttattattattattattattactcttttctttttttgagatggagtcttgctctgtcacccaggctggagtgcagtggcaggatctctgctcactggaacctccacctcccgggttcaagagwttcttctgtttcagcctcctgagtagatgggattacaggcatgtgccaccatgcccagctaatttttgtatttttagcagagatggggttttaccatgttggccaggctggtctcgaactcctggcttcaagtgatctacccgctgtggcctcccaaagtatcaggattacaggcatgagccacagcaccctgccaggcttgggtgttcaargaagagaaagaaggcagtgtggctgggacataagtgaatgagaggtggtagggtaagaaatgtgtagaaaactatgcaggggcctgatcacattggatcttgcacatctttttccaaacctcaggaggagtcattctgctkttgttgttactggttcctcacttccgcactttattgtatgctgacaaccttccataccatgggactgagactgccctcaatagtatcaccaatgtctttttttgttttttttttttgaggcagagtttcactcttgtcgtccaggttggagtgcaatggcgtgatcttggctcactgcaacctccgcctcctgggttcaagcgattttcctgcctcagtcttccgagtagctggggttacaggagcctgccaccacacctggctaatttcttgtatttttagtggaaatggagtttcaccatgttggccaggctggtcttgaactcctgacctcaggtgaaccacccgccttggcttcccaaagtgttgggattacaggcatgagccaacgcacccagccaccaatatcttaatggccacacagtgctcattgatagatgccttggccctgggctattgttgctatagaattggtttgatgagtacatattacatgagatctgggctcattagagcttatggcttgagcagggactccttggcctaggtttatgctgctcctggccttgttaatgactgctattaacactctaccccctttttatttttttgagatggggtcttgttctgtcgcccaggctgggaggctggaatgcagtgatcttggctcactgcagcctcygcttctcaggcttaagtgatttttcctgcttcatccttctgagtagctgggactacaggcacgcaccgccgtgcccgtttgatttttgtttttgtttttttagtagacacggggtttcaccatgttgcccaggctggtctcaaactcctgacctcaagtgatctgtctgcctcggcctcacaaagggctgggattacaggcatgagccattgcgccaggcaccactctacccttttgactttgagcaagtaaggtcgttgattccatacattcattaagattcctgcgtggcagaaatctaaccccaactggtataaccaagacaaggaattgattatctcataaccttaaatcaggtgtggctgcatctaggtgttcaaatgatattgtcaggacccaggctctccatcccttggcccagctttcctctgttttggcttcactctgaggcaggctctcccttgtgatagcaagatgaccaccggcagtttcaggcttacctccggcttcaggcttacctccagcttcaggcttaccttaccaaccctagtggaaagagagtttcatttttgacagctatgcaaaaggtctggacctgggccctcactggcttagtatgggttaggcccatccttaagccaatcattggctcagcatgggttagatccgtgactgtcactggctgagcatgggggttaggctcaccctatcattggctctgcgtgaattaggcccacctctgtcactggctcatcgtgggttaggcccacccatgagctgatcactaaggtcgtgaataggcatatgcctcttcccaggtgtggaggatgatgtcagatccctctgaactcatgaaatgagtagggtattctcccaagggaatattgtgctgtcacagaagatggaaaaatgaatgcatgtctggaaaaaacaagcaaaactacaaatcattagctttatatgacatttatttattttttgtttatatgtttttgaaatggagtcttgctctgttgcccaggctggagtgcagtggtgtgatcgtggttcactgcaacctctggctcccgggttcaagcgattctcatgccttagcctcccgagtagttgggatcataggtgcctgccaccacacccagctaatttttgtgcttttagtgtagacaggattttaccatgttggccaagcttgtcttgaactcttgacctcaagtcatctgcctgcctcagcttcccaaagtgttgagattacaggcatgagccaccacgtctggccagctttgtatgacatttcgcctttctgccttgatcaaactttcagagaatctgctttccagagggatgagtgggtcgggaaatagcatgttttctctgaatgagggaaaggattgaaaaagtaggagggagaaaggatgtgaatatgagtcccaacaaatgcagagttatcggtaagttttgtgcttgaatctaggtacaattgtgcatttcctggttctgcatgaattaggcccacctctgtcattggctcaacatgggtgaggctcactaacttccaccagaagttagtggtggtgtctgtgttgacacttacatgtttagcctaatgatttcatgttttaaccaaaactatatagcttgttggttatatcttagaaagtgatggtttttgctcattcttttgtccccagggatacacaccagcctctaagttctcttgagggaaggaagggaccttgcacacaatctttttttttttttttttttttttttttttgagaggaagtctcactctgtcacccaggctggagtgcagtggtgcgatctcggctcactacaacctctgccttctgggttcaagtgattctcccgcctcagcctcccgagtagtggggattacaggcgcacaccaccatgcccggctaatttttatatttttagtagagatggggtttcagtgtgttggccaggctggtttcagactcctgagctcaggtgattcacctgccctggcctcccaaagtactgggattacaggtgtgagccactgcgcccggccttggacacaatcttttttttttttttttttgagacggagtctcgctctgtcactcaggctggagtgcagtggcacgatctcagctcattgcaacctccacctcctgggttcaagcaattctcctgccttagccgcctgagtagctgggactacaggtacctgccactgcgcccgcctaatttttgtatttttagtagagatggggtttcaccatattggccaggctggtctcaaactcctgaccttgtgatctgcccgcctcggcctcccaaagtgctgggattacagatgcgagccactgagtctggcctggacacaatcttacttggattcctcatgcccttttgacaagctcagagcctcaaataaattcagaaaataggtgattacatcaaacagcctctatcaacagggagtatacaaaccgttagcccaactgttaatagaagtctgctttcttgctgggtgtggtggctcacacctagaatcctagtgctttgggagtacaaggcaggaggatcgcttgagcccaggaatttgagaccagcctaggcaacatagtaagaccccatctcttaaaaaaaaaattagcttggcgtagtggcstatacctgtagtcccagctagtcaggaggctgaggcaggaggatcagtgccgcctaggagttcaaagatgcagtgagctatgattgtgtcactgcactccagctgggttgacagattgagaccctatctcttaaaaaaaaaattgcttccctcacctctgctgtgaaacagctcaaagtcctgagagccaaggcccctaccgcccacatcctctagctgttggctaatttatttcatcgtcttttaggtaattctccagaattccatckctttcctctttttcacctcccagttactcctgcactcagttcttcgtctttcctcctccactgtgtagaaactgttcttgctcacaccgccagtgaccgactttcgctcagccttgtggatattttccagcccttatcttccctgcttctctgttgcatccttgtgacactggaatstttcccttttttcccttgaaaccgcccactcccaggacagcacagtcttcctgattctcatctctctcactctgtttcttctctgcctccttcggttaccatttcttaaactgcccacctttccaatattggcattcttcactgttccatacacagtccctaggcgattcttccatggtcacgaggaaaagagaaaaaccagctatagacgcatgactttcaaatggatattgttgacccaatttcaaccctgagtttcagctgcgatattgcatcttggtgtgtcatggacatgtcaagctgtgaatgtctgagactgggtttgttatctctccttaacccacccacctacccaagagttttacttkttttttttttttttttgagtctcgctctgtcrcccaggctggagtgcagtggcgccatctcggctcactgcaagctccgcctcccgggttcaagccattctcctgcctcagcctcctgactagctgggactacaggcacccgctgccaggcctggataattttttgtatttttaatagagacagtgtttcaccatgttagccagaatggtcttgatctcctaacctcgtgatccacctgcctcggcctcccaaagtgctgggattacaggtgtgagccaccgcgcccggccgagttttccttttgattgtcctttttttttgagacgggatcttgctgtgttgcccaggctggagtacagtggcatggtcatgggtcactgcagcctcgacctctccttgcccctcatcctctcgagtagctggaactacagacacaccaccatgaccagctagtttttgtattttttgtagagatagggtctcaccaggttgcccaggctggtctggaactcctgggctcaagcattccacctgctttggcctaccaatgtgctgggattacaggtgcgaggcactgcacccagccaccttctggaagtctttatctctggtgatggggatggtggcggcacccaattgcctaaggtagagccccagaagatgtcctcacctcctttttctctctcccctgccccgaaaagtcataattcatcaagttctggtaagtttgscttctaaatatttttggagtccatttctgttccctccatcttcattcctactttctttttttttagacaaggtctcactctcttgcccaggctggagtgcagtaccgtgatcatagcttactgcagcctcaaattcctggactcatgtgatcctccttcctcagcctccagagtagctaggactacagatgtgttgcaccacaccagtctaattttttaaaaagtttttttgtcaaggtagggtcttgctgtgtttcccaggctggtcttgaactcctggtcccaagtggtcctcttgccttggcctcccatagtgctgggattatacgtgtgagccactgtacctggcctattctcactttctaattcaggccacgttcctttctcttttcttttttttttttttttttttgagatggagtcttgatctgtcgcccaggcttgagtgcagtggcgtgatctcggctcactgcaagctctgcttcccaggttcacgctattctcctgcctcagcctcccgagtagctgggactacaggcacctgccaccacgcccagctaatttttttgtatttttagtagggacagggtttcaccgtgttagacaggatggtctcaatctcctgacctcatgatccgcctgcctcggcctcccaaagtgctgggattacaggcatgagccaccgtgcctggtctcttttcttttttaaataggatctcacttcatcacccaggctttagtgcagtggcactatcttggctcaccgcaacctctgcctcctgtgctcaggtgatcctcccatctcagcctcctgagtagctgggaacacaggcatgtgccaccacagctggctgatatttttctatttttagtagagacggagtttctccatgttacccaggctggtctcaaactcccaggctcaagcgatctgcctaccttggcctgtcaaagtgctgggattataggcgtgagccactgcacctggcctccaccttcctttctttcttgcattgctgcaggagctccccatcttaggccttgtccttcctctgcctgtccatggccaccaggaccagctttttaagcaggagagcccatcatatcacatcactctcttccctaactttctccaatggtttcccattgccactaagtttcttaacatcttgcaaaagccgtctgtgacttagcccctttatttcagtctgtccaggtaggttcccttccactcgtcacctttcaacccaggcttaccagactccctctagctcccctacaagtgcctggctgtttctcctcattccttcttcccctgctcaattaccattgccttccagttctttcatattcttttttttttttttttgagacggagtctcattctgtcgcccagtctggagtgcagcggcacgatctcagctcactgcaacttccacctcccaggttcaagtgattctaccgcctcagtctcctgagtagctgggagtatgggtgcccgccaccasgcccagctaatttttgtatttttttttagtagagacggagtttcaccatattggccaggctggtctcgaactcctgccctcatgatctgcctgcctcagcctcccagtgtgctgggattacaggcgtgagccactgcacctggctttttcatattctttcacatgctcctcatgtgtcgcctcttctaggaagccttccttgactttcgggttgagttttgaacttcttaaatatcctgggcactgatagaaatgtattttcaggtgcatacatatttcagaacacaccaatgtgtatactcaaatatatgcaatttattgcatgtcaaaatcctgtgcacatttctgtggctatactaggcacatagttttatcataatttacatggggttgggtgcggtggttcacgcctgtaataccagcactttgggaggctgaggtgggtggttcacttgaggtcaggagtttgagaccagcctggccaacatggtgaaaccctgtctctactaaaaatagaaaaattagccaggcgtggtggcgcatgcctgtaaaatcgcagttgctcgggaggctgaggcacaagaatcatttgaacccaggaggcagaggttgcagtgagcygagatcacgccactgcactccagcctgggtgatagagcaagagtctgtctcaaataataattataattattattttatgcgtaatttccattccagcccccactcccccactccctccaccagactgtgaggcccctttagggaaggcaggcatcttggagacgttttatgtggctccctaggtcctttagtaggtgctcaataaatatttgcatagggatatccatgagccttgatgttaacccagggaatataacaggtgagtggattgtgttttgtttgggtttagcttcagatttttggcagtatttaatcatttaacccagcataaagtttatttatttatttatttattttgacacagagtctcggtctgtcactcaagctggagtgcagtggcgccatctcggctcactgcaagctccacctcctgagttcrcaccattctcctgcctcagcctcctgagtagctgggactacaggcacccgccaccacacccagctaatttttcgtattttagtagagacggggtttcaccatgttagctagggtggtctcgatctcctgacctcgtgatccgcccgcctcagcctcccaaagtgctgggattataggcgtgagccaccgcgcctggccaagtttttttttttttttctgttaaaggggatcagctgtttaaccagatgtgggtaatcattttgaaaccttctctcctagacaccatgccacaaggagagtgatctcttcccctgttttcacaatggaggactccggaaagactttcagctccgaggaggaagaagctaactattggaaagatctggcgatgacctacaaacagaggtcagtccgagttcacctgcttttccttttttttttttttttgagatggggtcctgctatgttacctaggctgagtgcggtggctgttcctaggcgtgatcatagtgcacagccgccttaaactcctgggcttaagcgatcatcctggctcagcctcccaagtagatgggactataggtgtgcttcaycaggccaggcttttttttttttggcggaaacaggggtctcgctatgttgcccaggctggtcttgaactcctggactcaagtgatgcacctctgcctcccacagtgttgggactacaggtgtgagctctcttttttctataaaaagaacagcaaccatttattgcaggcctatatgtgccaggcagtgtgaaaggcttaacttacactatctcaaaactgcctgtgaaaaaactattagcaccccattatatagatgaagaaactgagcctcagtgaaggcagataacttgctcacagtcacacagccaataagtagcagagctggaatttgaactccagacctatggtcctgattatcctactatgctactttacattttgttttcttattttctttttcttcttttttttttgagacagagtctcactctgttgcccaggctggagtgcagtggtgccatcttggctcactgcagcctccacctctgggttgaagcaattctcgtgcctcagcttctcgagtagctggaattacaggcacccaccaccacgcctggctaattttttgtgtttttagcagagacggggttttgccatgctggtcaggctggtcttgaactcctggcttcacgtgatctgcccgtctcaccctcccaaagttctggaattacaggcatgagccaccatgcctggccttccatcttattttcttttttttttttttgagatggagtttcgctcttcttgcccaggctgtagtgcaatggcatgatctcggctcaccacaagctccacctcctgggttcaatcgattctcytgcctcagcctcccgagtagctaggattacaggcatgcrccaccatgcccagctaattttgtatttttagtagagacggggtttctccatgttggtcaggcagctctcgaactcccaacctcaggtgatccacttgcctcggcttccctaagtgctgggattacaggcgtgagccaccacgcccggtgtccatcttattttctagaagggtttttatcagttcctagatgccatatctggtaagttctttgtgcacagggaaagagcttttccctatgcctagcaaaatatattgctaaagattttaagatttgaaactcgtgttttggtcagggctcatatctgggaggtgtgtgtgtgtgcgtttggtttggcactgtttttatttataatgggtctttataatttgtacatagaggccttattccagtccccttagtttctttcatttattgaaaaattattttaggtccaggcacagtggctcacatctgtaatcccagcactttgggtaggcagatcacttgagctcaggagtttgagaccagctctagcaacatggcaaaaccctgtctgtacaaaaaatacagaaattagcaggcatggtggcatgttcttatagtctcagctacttgggagcctgaggtgggagaattgcttgagcctgggaggtcgaggctgcagtgacgcatgatcacacctctgcattccagtctgggtgacagagcaagactctatctcaaataaataaataaaaattattttagagtcagggtctcactctgtcacccaggctgaattgcactggctcttcacaagtgtgacctatctcactgcaacccctgggaccccaggtgatccttctgcctcagcctcccaggtagctgggactacaggcgtgtgccaccatgtctggctgatttttaaacacatttctgtagagatgaggtcttactatgttgccctggctggtctggaactcctggcctcaagtaattcttaatgagccactgtacccagcccttcctactttctttattctagtttgacttaaaggtaattcaggcttgatatttttaaaatattccttgaatttggccaggtacaatggctaacgcctgtaatcccagcactttgagaggccgaggcaggcagatcacctccagtcaggagatcgagaccagcctggccaacatggtgaaaccccgtcactactaaaaatacaaaaattagctgggtgtggtgccgcatgcctgtagtcccagctactcggragactgaggcaggagaatcgcttgaacctggaaagcagaggttgcagtgagacgagattgcagcactgcattgcagcctgggtgatagagcgagactctgtcttcaaaaatattactacgtgatgattaacaattttgctgtagggcagaaaatacgcaagaggaactccgagaattccaggagggaagccgagaatatgaagctgaattggagacgcagctgcaacaaattgaaaccaggaacagagacctcctgtccgaaaataaccgccttcgcatggagctggaaaccatcaaggtgaggggctgagaggaagtgtgctcaggtgtagacaggcgtccaacacaggcatggcatgcttggctggaagaaggaaccctgcaatgagggactccagaccccaggcccatgctcatctctggaagggcctgtgsggcagacgtgatctttgaactctttgtgcctctagtgggtggtgctttttgttttkttttttttttttttttgagatggagtttcactcttgttgcccaggctggagggcagtggcgcgatcttggctcactgcaacctccacctcccaggttcaagtaattctcctgcctcagcctcctgagtagctgggattataggcgcctgctaccacgcctggctaattttttttgtatttgtagtagagacggggttttatgttggccaggctggtctcgaactcctgacctcgggatccatgatgggtggagctttgagaagcaagtcacacacatgttcccgtggactttcttggttgtgtacactgattttatagggcacatggcagggagacttttttttttttttgaaacagggtcttgctctgttgcccagactggagtacagtggctggattacagctcactgcaccctggacgtctcaggtttaagcagtcctctcacctgggccgggcgaggtggtgcatacctgtaatcccagcactttgggaggctgaggtgggcagatcacgaggtcaagagattgagaccatcctggccaacatgatgaaaccctgtctctactaaaattacaaatattagctgggcgtggtggtacacgcctatagtcccagcttacttgggaggctgaggcaggagaatcacttgatggttggaggctgtagtgagctgagattgtgccactgcactccagcctggcaacagagcgagactccgtctcaaaaaaaaccaaagtccttccacctgaacctcgggagtagctgagactacaggcatgcggcaccatgcctggttagtttttgtattttttatagagacagggtttcgctgtgttgcccaggctggtcttgaactcctggacgcgagcagtcctcctgccttggcctcccaaattgctgggattataggcatgagccaccacctggccagggagacatttttagggtatggaggtgttgctagagtaatatcatcaggtccaatattgtagcccttagctacatttggctgttgaaatttaatgaattaaaataaaaacttaattcctcagtcacagtagccacatttcaagtgcttaggagccacgtgtggccagtgagtttccttagtggacagaggggctgcagaccatttccttcattaccaaaaggtgtgttgcactctgccagttcagagcaggtttctcgacctggctgctgttgacattggagcccggatcatcctccgttgggagggactgaggtttgctttgtgggttttttgtttgtttgttttgtatttttgagatggagtcttgctctgttgcccaggctggagtgcagtagcgcgatctcggctcactgcaagctccgcctcccaggttcacaccattctcctgcctcagcctcccgagtagctaggactacaggcgcctgccaccacgcctggctaaattttttgtatttttagtagaaacggggtttcaccgtgttagctaggatggtcttgatctcctgacctcaggatccgcctgcctcagcctcccaaagtgctgggaatacaggcgtgagccactgtgcccagcctgttttttttttgagatggagtcttgctctgttgcccaggctggagtgcagtggcacaatctcacctcactgcaacctccgcctcccaggttcaagtgattgtcccgcctcagcctcttgagtagctgggattacaggcaccctccaccacgcctggctaattttttttttttttttttttgagacgcagtctcactctgttgccaggctggagtgcagtggcgtaatcccggctcactgcaacctccacctcctgggttcaagtgattctcctgcctcagcctcctgagtagctgagattacaggcacacaccgccatgcctggctaatttttgtatttttagtagagatggggtttcaccatgttttccaggatggtcttgatctcttgacagtgtgatctacccgccttagcctcccaaagtgctgggattacaggtgtgagccaccacgcccggctaatttttgtatttttagcaaggacgaggtttcaccatgttggccaggctggtctcgaactcctgagctcaggtgatccgcccgcctcagcctcccaaagtgctgggattacaagcatgagtcaccccgcctgaccacactgtgggatgtttggcagcatccctggcctccaccctctagatgccagtagcattccccgcacctccaaggtggtgaaaaccaaaagcacctctagacatagccaggtatctggagacccagtgctctgcaaggtaaaaaccatcccttctgtacatgctgtagggctcagcaagggatcactaagtcaacaccgtgccccagagactggctctcagccttagctgccagccagcatcactaggccagcttcataaacatccgacaggcctgaaccctctctccccatccccatctccccgccttgctctgagattccatttctcagtaagtctgggtggggccctggcatgtctgtgtggttttctttttctcattaaactcccaatgtacattttgatgagctgcttcatggaagagtcaaaactgtgkgtgcccagggctaggtatgatggacggtgaaaggggaagtgctggttgccttctttgggaagacaaacctaatgccatgaagcagttggggacgtgaagctcagtcacagaactctgatgtgggggcctttcaagagaaaaaggactggctgggtgcggtggctcatgcctgttatcccagcacttcaggaggccgaggtgggcagatcacctgaggttgggagtttgagaccagcctcaccaacatgacaaaaccctgtctctactaaaactacaaaattagctgggtgttgttgtatgtgcctgtaatcccagctacttgggaggctgaggcaggagaatcacttgaacccgggaggcggaggttgcagtgagccgagattgcaccattgcactctagcttgggcaacaagagcgaaactctgtctcaaaaaaaaaaaaaaagaaagaaaaagaaaggactgcatgggttgagggaggctgtgtggagggtgtttgtaggtgtatgtgttgctgacacttggtgcttggggagatggggctgaaggagagttgatctgtacccatcacagacgtggacaagaatgggtgtcgggtggaccttggcaagcccagctttactaatgtataggaaagggtgtgggaccaacaaatggattgggggtttggggcagggcggaggagaggtcccagacacgttgaaggtggtcattgaagctgaagctttctgttggagaccacagagtgcagctggccgtctgcagatccatctgccccataggtgttgtttgatcgccttcaggggtttttgttcagcatttccccatgaacgttttccagcatataaggctgaaagaatttccagtgaatacctgtgtatccaccaccacctaggctctaccaataatatttcccctacttacttgccttttattatatatattcccccatccatcaaaatttgtaaagcttcctgtaaaaagatggatttctggccaggcatggtggttcatacttgtaatcccagccctttgagaggctgaggagggagaattgcttgagaccaggagttcaaggccagcctgggcracatagcgagactctgtctctacaaaaaaataaaaayaaaaaattcattggacatggtagtgcacacctgtagtctaagctactcaagaggctgaggcaggagcattgcttgagcccaggaggttgaggctgcagtgagctatgattgtaccattgcactccatcctgggtgacagagcaaaagttaaaaaataaaaaacctgagtagtggttgtttagaacacacatygttgagtttcccccaatccccatatccgtgacacggagaccttagtgtcatctgcctctccctgtacttggcccacttcacccatttgttaacagctgaacacctgctacacacaatgagcaatgattatcgttctttttgttgttgttgtttttgctgttggagacagagtctccccctgtcacccaggctggagtgcagtggtgtgatctcagctcactgcaacctctgacttccaggcttaagtgatcctcccacctcagcctcccaagtagctgagattacaggcacctgccacaccacgcctggctaatttttgttattttttgtagagacgggttcatgtgcccatgctagtctgggactcctgagctcaagtgatccgcctgcctcggcctctcaaagtgctgggattacaggtgtgagccactgcgcctggctgattatagttcctaaattgaaggggactctgggttgaaaagctgggtaggaggaagattagtggtatgaactgcagtttggagaggataacaggccctccatggatcctgagtaaaatatcaagagaattactcagtaattctctgcttcaagactgagctcttgggcctggcgtggtggctgatgcctgtaatgccagcactttgggagaccgaggcgggcggatcatgaggtcaagagattgagactgtcctcgctaacatggtgaaaccccgtctctactaaaaataaaaaaattagctgggcatggtggcgcacacctgtagtcccagctactcgggggctgaggcaggagaattgcttgaacctaggaggtggaggttgcagtgagctgagattgcgccactgtactgcagccacatgtcagatgcaggagactcagagcacacagcacagtgaagaaacagggtaccttggaataacgaggaccctgccaccagcaagtatttgtcagtcacctaagagaaatatattcagctgggccggacttcttaacaactggcttattcatcacgggttgaatgaaaaagcctttaagggaccaaacagagcatctattgatgcccccatcagctgacagcttattcgaattagccccaaatggcagcacaacatttcagcaacaggttttcatgtccacaggttccgaggagatctctcaatcgccagtgcagtcggtggagcccactcgctgcgtcctcctggagcctgcgtttgaatttaggttaatgacttaagatcctgttttatttggagatgttcccaaataaagggtgtgaggcgatgagagccacgcctgggaacagggcctggtctgcctctacttgctgggtgcagatacttctctgcttacagccaggaaatggggagggtgctgcgggcggcagcagggatgtggtccgccctcctcatccttccaacgctgtaaatcatctgtttgttctttctttggagtcttcttgcacaatggctctcgccacgcctctctggcctaggcaccattacatcaccctgggtgcatccggactttctagcaacggctttgtttacttgattgagtaaagagaagttggccttttttaacttttaaattagaccttgcgcctttcttgtgggaagtgttttctcttatgtttgtagaatctaggatgggtgttttgtgttttcggttttgatttttttttgagatggggtctctgtcacccaagctggagtgcaggggcacaatcttggctcactgcaacctccgcctcccgggctcaagcgattcccctgcctcccgggtagctgggaccataggcacttgccaccacacccagctattttttgtatttttggtagagacgggggtttcaccgtgttggccaggctgttctcaaactcctgacctcaagtgatctgcccgccttggcctcccaagtagctggaactacagccgtgyaccactatgccgggctaatttttgtattttggtttcgccatgttgccccaggctggtgattttttttttttttttaagcgttggcctgggctagagtgcagtggcatgatcatagtttactggagcctcaacctcctggcctcaagcagtcctcccacctcagcctcccccatagctaggactgcaggtgcatgccaccacgcctggctgttcttaaattttctgtagagatggagtcttcctatgttgcctaggctaatatgcctctgccacctgaggtgctgggattgcggcatgaggcaccgcacctggctctgggtgtttggtgaaggaaagtaatttggaagcagagcaggaatagaatcgagagagcacgggaacgggcaggtgatctggattgagatggtttagggctggttagcataattgcttaaggacacctgctcaggaggctggggtttggtcttggcccagtcatttgctactggttgattctgggctagttaagtaattgagtctcagtgttcatgtctctgaagtggaattaaacgagacaacataggaagtgtacttagcctggaggccagcacagaataagtatgtaatggatgttattgctgcagctggcaacagggaatcattgagaagtgcgctggactgtttctttggtaattaacaagatctccctctctgtctctctcctctccttttctctccctttcccttcctccatcttctccctcccttctgtcttagtttttgtttgtttgttttgagatggagtcttgttcgtcgcccagactagagaacagtggcacaatctctgctcactgcaacctccgcctcctgggttcaagcgattctcctgcctcagcctcccgagtrgctgggattatagacaacrcaccaccacactcggctaatttttttttgcatttttggtagagacggggtttcaccatgttgtccaggctggtcttgaactcctgacctcaggtgatccacctgcctcagcctcccaaattgctgggattacaggtgtgggtcactgctcccggcctgtctttgtttttaaacccagagattggaatgttctttctgtctccatgctacaacggagagtcctggatcaaaaattcagaataattgactgttgtgtaaaccaagtacatgctgctctcccattgttgtgggcacaaacaacagaagtcattgagattcctttttttttgctttttgagatagctgggtctcactctgttgcccaggttggagtgyagtgatgcaatcacggctcactgcagcttcaacctcccaggctcaaatggtgttcccatctcagcctcctaactgggactacaggcgacgccaccatgccctgctaatttttattttttgtagagactgagtctggctctgtgggccacgctggtgactctttgtaatacggtgataatgtgtgaaagcaggcttgcgttgcccctgtggatgaggcttggagaggtccatgtggctttctttggttgtggacaccttgggcagaatgatttgtctgaagattgctgggggcttcagacaatgatttgtctgaagattgtgggaaccaggtttgggagtgggcaggattcaaggtgctcaaggggcaggaggtgggaggcacttaggacataattgaaacagttattcagtgtgcctgcctgcccgccccctcccagtcccccaccactgccagagagttttgctcttgttgcccaggctggagtgcaatggcacgatctgggctcactgcaacctccgcctcccgggttcaagagattggcctgcctcagcttcccaagtagctgggattatagacgcccgccaccaggcccagctaattttttgtatttttagtagatacggggtttcgccatgttgccaggctggtgattttgggttttttttttttttgcttgttttttttaagtgtcgtggtctcactctgtggcctgggcgggagtgcagcggcgtgatcatagctyactgcagcctcaacctcctggtctcaggcagtcttcttgcctcaccctcccaagtagctaggactacaggtgcatgccaccacgcctggctgttttcacattttttgtagaggcagagtcttgcccaggctggtcgagaactcctgggctcaagcaatcctgcctctgccacctgaaagtgctgggattacaggcatgaggcaccacacctggctctgggtgtttggtgaaggaaagtaatttggaagcagagccggaacagaatcaagagagctcgggagtgggcaggtgatctggattgaaatggtttggggctggttagcataattgcttaaggacacctgctcaggaggctggggtttgatcttggctcagtcatttgctaccagttgattctgggctagtcaggtcactgagcttcagtgttcatgtctccaaagtgggattaatgagacaacataggtggtgtacttagcctggaggtggcacagaataagtatgtaatggatgttattgctgcagctggcaacagggaatcattgagaagtcagctggactgttcctttggtaattaacatagatctctctccctttccttccctctccctcccttcctctctcctctgtctcccttcctctctcctctctctccctcccccattttatcccctccttttctccctccttctttttctttctttctttgtttttctggtttttttttttttttttgagacagagtctcgctgttattgcccaggctggagtgcagtggtgcaacctccgcctcccgtgttcaagcgattctcccgcgtcagccttctgagtagctgggattataggcatgcaccaccacgcctggctaatttttttgtatttttagtagagtccagatttcaccatgttttcgaggcaggtctcaaacttctgacctcaggtgatccgcccacctcagccctccaaagtgctgggattacaggtgtgagccactgcgcctggcctgtctttatgtttttaaataacctagagatcaaactgttccttttttctccatgtcacaacggggagtcctggatcaaaaattcagaatggcggactgttttaaaaccaagttcatgctgccctcccattgttgtgggcacaaacaacggacgtcattatgatttctttccttttgaggcagcagggagttgcccaggccggagtgcagtggtgccttcacagcccactgcagcttcgacctctcaggctcgaatggtcctcccacctcagcctygcgagtagctaggactacaggcaagagccaccatgccctgctagtttttattttttgtagaggccaggtctcactctgtgagccgggctggtgactctctttgtaatacactgatgatatgtgtgaaggaggcccatgttgccgtgtggatgaggcttggagaggtttacgtggcttgctttggctgtggacaccttgggtagaatgatttgtckgaagaatgatggaggctataggaatctcaaccctgttgagagtaggcaagattcaaggtgctcagggggcagaggcactcaggacataattaaaacagttggtccgttgtgcctgctttgaatgacacctgcctgttcccaccacgttacatcacttgcctaagagtcagctctggagagaaggttctgttgactgagcctggcttgtctcccgattgtggtgggagggtgggacagaaagcctggagccccacccagggagtgtggtgggaggagtagtttcataaagagagagggtcaggccaggtgcagtggctcacacctgtaatcccagcactttgggaggccgaggcgtgcagatcacttgaggtgtcaggagttcaagaccagcctggccaacgtggtaaaacccggtctctactaaaaatacaaaaattagccactattgttggtgggtggctgtattcccagccacttgggaggctgaggcaggagcattgcttgaacctgggaggcagaggttgcagtgagccaggatcttgccgctgcactcaagcctgggcaacagagtgagactcggcctcaaaagaaaaaaaaaaaaacacggagtcttgctgtgttgcccaggctggagtggagtgttacagtcatagctcactgcagcctctaactcctgggctcaggcagtcctcccagtttagcctcccgagtagctgtgactccaggtggatgtgtgctactgygtctagccttctcagaagtcttaagtcattcactcagtgtctgtgttgtccttcaggagaagtttgaagtgcagcactctgaaggctaccggcagatctcagccttggaggatgacctcgcgcagaccaaagccattaaagaccaattgcagaaatacatcagagagctggagcaagcaaatgacgacctggaaagagccaagcggtatgggtggaagggaaaagcacgagtgggagactctcctctctgctttttgtccccagcagctgggtactgggccctgtgctgagtatagggaactaagcagtgagcagaacaaagccagtgcccttctggattttagtgcccggggggaaatggacaatagtcgaagaagtgcaatttcattacagcagcaaggctggcagcccagggtgctgtgggggtgtgtaataggatgtattaatttggctgttggcctgggagcgtcaggcgagccttaccaggggaaatgctatttaggctaagaccagaggaatgagtagccatgatgccaggaggggtgtgagacaagaacattccagacagaacaccaagcctgtgctaagcccctaaggtgggaaggaagctttttcaaagaacagttttttgtttttttttggagacggagagtctctgtcgccaggttggtgtacagtggcgtgatttcggctcactacaatccctgcctcctggattcaagcaattctcatgcctcaggctcctgagtagctggaattacaggcacgtgccaccacaccattctaatttttgtatctttagtagggatgggctcttgccatgttggccaggctggtctcaaactccttagcctccaaagtgctgtgattacaggtgtgagccactgcgcccagcccagtgattcctaaactgatgttctgtggtttagcagaatgataatgactaacatttacagaagaattactctcagccaagcagtttttttggataagaacacttgtttttaaaaaatttatatatgaattatatacagtgaaatgcgcagatgtggccaggcacggtggctcacgcctgtaatcccagcacttttggaggccgaggtgggcggatcacgaggtcaggagatcgagaccatcctggctaacatggtgaaaacccgtctctactaaaaatacaaaaaattagccgggcgtggtggcgggtgcctgtagtcccagctagtcgggaggctgaggcaggagaatgatgtgaactgggaagggcggagcgtgtagtgagccgagattgcgccactgcactccagcctgggcgacagagctagactctgtctcaaaaacaaaacaaaacaaaaaacaacaaaaaaacaaaaaaagcacagatgttttttcttwtatttatttttggaaacagggtcttgctctgttacccaggctggagggcagtggtgccaccatagtgcattgcagcctgaaacttctgggagcaagtgatcctcctgcctcaacctcccaaagttctggaattactggcatgagccactgcacccggcctcctcagagagttttttttctgcctcattctttttctcctgtccgtctcggacgccatctatacacataacctttttatattgtcaggcaggttcctaaggctctcttcatttttcttttccctaattatttttttgtctttgttcttcaaattgaataatttctgtttatccagtttcaagttgatagacgccctcttctctctccaatctgccattatagcagatgaaatattgaattttcaatatattgtatttttagatgtaggatttgtgtttgttcttttataatttctgttctattgaggtttcttgacatccttgagcatagttgtaagagctgctttgaggtccttttgtgcagttttcaacatctgggtcacattttctttatactccacgcattcaataactttggggttgtattgtaggcagtgtgagtggtgtttcccacgtggtgtttcccacagactattagttgttttttgtttttgtttttgttttaagacagtcttgctctgtcgcccaggctggagtgcagtggtgcgatctctgctcactgcaacttccacctcccagattcaagtgattctcctgcctcaacctccggagtagctgggattacaggtgtgtgttaccacacccggctaatttttgtatttttagtagagatgggatttcaccatgttggccaatctggtctcatactcctgacctgaggtgatctgcctgcctyggtctccgaaagtgctgggattacgggcttgagccaccatacccagccagagatgatgaattcttttatgttcttgatttatttggttttcttaggtggtttacttggctgagcttacagcccaaattctgtctcccctttgatgggcagtagctgaaatctctttgctttttttagccgtaactgggctgctttgtgtctgctctgtgcacgtgtggtttgggggaggccagagatgtgggaagatactatattcagaatgtgggggggcccacggtgatagatttctatccctggagctttaggcaaaaatcttgtaaagatgcagacttcacccagtcttgttctgtttttctaagcgttgttttccagttcctgccagtgcactcagattattgttgtaaacattttacttagaatttatacgaggtttgatctgatacaggtttcctggtcattaccagaagtggaaattcctttcttgtcaatctgtaggagttctttgcatatatatattttttgagatggagtctcgctctgtctcccaggctggagctggagttcagtggtgtgatctcaggtcactgcaaccactgccttcctgcttcaagtgattctcctgcctcagcctcccaagtagctgggattacaggcgccccccaccacgcctggctaatttttgtatttttagcagagacggagttttgcgatgttggagaggctggtcttgaactcctgacctcaagtgatccacctgcctcagattcccaaagctggaattacaggcatgaaccactgtgcctggccctttgtatatttttactactaatcttttctcctgcattgaaaataattttttccgtggtaatcttttgtttgttgactttgtctattstatcattttccatacaaatatttccttttttctcttttgaaaaaaaattttttatacatgtatttttcatttttaggtcatcagttacatctttttttaaataccttctaggtttgcagatttcactagggaagtctccttggttcttgattgttcatgtgttttgtgttttttttgcaatattttttaattgtttaatttttttgtatccttattccttagtctgcaatgaatttatttttgtatctagtataagatacaagttcaattttatttttattttctttaggtggatagcccagttgtgccagcactgttaaacactgcctttttttttttttttttttttttttttttttttgagactgggcctcgctccrttgcccagagtagagtgccrtggtgcaattacagctcactggagccttgacctcctggggcaagtgattctcccacctcagcctcctgagtgtctgggactataggcatgtgccactatacctggctaatttttgtattttttgtagatacagggtttttccatgttgcctaggctggtctcaaagtcctggactcggtctgtccaccttggcctcccaaagtgctgggattataggcatgagccaccatacccggcctttggcatattttaaaattgggttgttcgttgttttttttcccatgatttctaggagatttttatatatttgtctgtgacatgaatggacagtattgggagtttgtcatttgtttccagctttgtctgatgtatattttattgtacagagttactgatttgttttgttttgagtcagagtcttgccctatggcccaggctggagtgcaggtgcaggatctcggctaactgcaacctccaccctcccaggttcaagctattctcctgcctcagcctcccaagtagctgggattacaggcgcccactgccacgcctggctaatttttgtatttttagcggagatggggtttcaccatgttggccaggctggtatttgatttttttgtagtcagatttcttagtcatagttagaagggccttgtgcactccaaggtttataaagcaattagccaagtgttttcttgtagtatttttgttttttctttcttttctatttttatttttgtactaaacgtgcattgtttttgttaatacaatttggccaaatgctgaatagtttagtgttaaaaatcggatgaggtagaagcccagttcaccattatagaatcaataaagttctaggtcaccaaagttttatgtatttatgttttgagacaaggtctctctctgtygcccctgctggagtgcagtggcacgatcacttcagcctccccagtagctgggactacagtcatgtgccaccatgactcactaatttgtgtattctttgtaaagaccgggtttctccatgttgcctaggctccaaagctttattttaaagacttgaaaatgttacaattttgtgcaagtttaatagttatatttagaacgtttgacagtcttctccaagaacaagagtttctcagcaccatcagctgtttgattgctctcatggtccttcttctataygtccctcaaacgaaactactcacttttaactgaggacaggcactttgtataagaataaccttgaaaagtgtgcaggacctaattggaagtaactaaaaattaaatacatttcctaaaggttactttgtttcatatgagtactaagatgccaaaaagttttacaaaaattcaaatagatttaatctagttttactcttttcataagtttttcattttattttatttatttatttttgagacagagtcttgctctgtagcccaggctggagtgcagtggtgcgatcttagctcactgcagcctctgcctcccaggttcaaatgattttcctgcctcagcctctcgagtagctgggactacattgcatgtgccattatgcccagctaatttttctatttttagtagaaatggggtctcaccatggtcctgacctcaagcgatccaccacctcggcctcccaaagtgctgggattatagccgttagctctcacacccagtccaacttacacattttttttttttaaagagatggggtcacacagtgtttcccaggctggtctcaaactcctggattcaaacaatcttcccatctcggcttgccaaagtgttgggattacaagcatgagccactgtgcccagccaattccatggacttttaaagcattttttggctcaaaaaggatatgttcttagttatctaaccagtatatctctttatatttactgaaaatctgttttcctatttaagtattttcaggttctcaataactgcacatgaaattaacagctttcatagtcacaaattattgcaatattttgctgttatactaaatatgggttttttttgtttgtttttaagacagagtctagctctgttacccaggctggagtgcattggcacaatcttggctcactgcaagctccgcctcccaggttcatgccattctcctggcctcagcctcccgagtacctgggacaacaggcacccgctaccacgaaccggctaatttttttgtatttttagtagagatggggtttcgccatgttagccaagatggtctcgatctcctgactttgtgatccacccgcctcagcctcccaaagtgctgggattacaggcactaaatatgcttttatacattagttgacagaatttcaacatataaaatacataaagcaattttcactccagttacaactagcatgctgacctttatttcaaagtaaatacgctaggtgagatagctcatgcctgtaatctgtcatcttagtacttggggaggctgaggcttgagtattgcttgagcccaggagtttgaggacatcctgggcaacatagtgagactcccgtctctagaaacaaatataaaaactagccggctatggtagcttgtgcctgtggtcacaactactcgggaggttgaggtaagaaggtgaaagaatcgctgggcgcattggctcacgcctgtaatcccagcactttgggaggctgaggtgggcggatcacctgaggttaggagttggagaccagcctgacaaagatggtgaaaccctgtctctactaaaaatgcaaaaattagccaggcatggtggcaggcgcctgtaatcccagttacttgacagactgaggcaggagaatcgcttgtacccgagaggcggaggttgcagtgagctgagattgtgctgttgcgctccagcctgggcaacagagtgagacttcatctcaaaaaagaaaaaaaaaggtgaaaggatgacttaaacccagggtgtcgaggttgcagggaaattcagaaatgccactgaagggccaggcatggtgtccaacacctacaatcccagcactttgggaggcagaagcaggtgcatcacctgaagtcgggagttcgagaccagcgtggccaacatggtggaatgctgtctctactaaaaatacaaaaattagcaggatgtggtggtgcgtgcctgtaatcccagctacttgggaggctgagacagaagaatcatttgaaccccggaggcagaggttgcactccgcctgggtgacaagagtggaactccatcttaaaaaaaaaaaaaaaaaaggcactgaagctggtccccagttccctagcattccagaagcaaaatagattttgaccaaataaggagtttgttaaaatttccgattcagtcggagtttgtgttagggtacagtatgaggtacgaatctaataattttttcctggtgggtacccagtggtccctaaaactagaactgaacctgccatctttttaccaatgatctgtgatgccacctttattataaattaaactcttgtctatttctggacctttggttcctttgttcttacaaccagtagcatactattcttcattgttgaggctttatagtagtgcgttctgactctctggtagagctagttccctgatctcttttacagagttcctctgatcattcttgtttcattgtcacaggatctttcaaatcagtccagtttattcccccagtagaaacgtattaagacagtgttaaatttatcagtttaacttgtggagaattaatttctgcatgataatgggtcttcctctttatatactcagtatgtctgcatttctgcaagcattctgtactactctacatattattatgtgaatattttatctttgatatgtcaaccttagggctgttttaactgtttctggtattgtactccgaagtattatccctttgttgttggtagtagtgtgttttttgtttttgtttttcgagacagggtctggcattgttacccaggctggagtgcagtggcatagtcatggcttactgtacccttgaattcctgggctcaagcagtcctcctacctcagcctccgagtagctgggactacaggcacgcatcatgcacggctaatttttttactttttgtagagacagggtctctctatattacccaggctggtcttgaaccctgggcctcaagcggtcctcacaccttggcctcccaaagtgctgggattataggcatgaaccactgtgcttgtccctttgttgtttttaatcggtactgtggtaactttatcctatccactacttctaaagaccctgtgagggtaggtacttgtatgactccatctagacatagtaggatatgttgaataaatgaactgatgcagccattaatcagtgcagttattaatttggtgattgaaggaactgaggatgaaggagatcaagttccgcaatgatactcagtgagttctaggtggaggaggagctgggtgttaactcctgggttcctctccaaacacgtgcttctgaccactgtgggatacagttagcaggttgtgtaaggtctggggacagacacagggtcaataataaaaattgctgaaaatttatagatgtgtgcttatgtgtaaaacatctgttgtgtgcttcctgtaggattttttttttttttttgggaaacattcttactctgttgcccaagctggagtgcagtggcatgatcttggctcactgcaacattcaccttctgggttcaagcgattctcctgtctcaccctcccgagcagctgggactacatgtgtgcaccatcatgcccggctaatttttgtatttttagtagagatgaggtttcaccatgtcggccaggctggtctcgaactcctgacctcaagtgatccgcccgcctcggcctcccaaagtgctgggattacaggcgtgagccaccgtgtccgggcctgtatgacttcttgccaccccttccccaccacaatcctgcatgaaggttactattactatccttgttttgcatgagagaaaactgaggtgcagagaaggtggttttcccagaattataacagattgttttcttacagcacttggcagtgcctttaccacagtgtttatgcccttcacaagaaggggttgtgagcagggcagctgggctggtactgggcattttgaacttccactgagaggttaaatatgatctcttccacctgcttaagtgcatcttatgcctggcacaatgcctcatgcctgtaatctcagtaactcaggaggctgaggcgggaggatctcttgagcccaagagtttgagattgcagtgagctgtgattgtaccactgcasttcggcctgagagacacagcaaaaacctgtgtcttaaaaaatcatgttgttatatgtgtttattaggttattattattttgagatggagtctcactttgttgtctaggctggagtgcagtggtataatctgggctcactacaacctctgcttcctggcagttctcccacctcagcctcccaagtagctgggattacactacaactggctaatttttgtatttctagtagagacaggattttgccatttgcccaagcttgccaggctggtcttgaactcctgatctcaggtcttccacctgcctcggcctcccaaagggctgggattacaggcatgagccaccttgcccagtcatattaggttatttttaatgctggttggcattgtgagcttgcaagagaagatggagcatagtggtcttctcaaaccaccaaatgccacatgcagtcctgatagggctttggcttattgctgagtgctgtgtgggcagcatcttatttaatcctcatgacagcctcgtgcaccccatgagctatgatgagtcccattctgcrggtaaagagcccatgccccagaaggttaagggacttgkcccactctgtggcatctaggaagtttggggctgggacttgtgcccaggtgtgtctgacccttcgcacctcctggatccgyggtgctggagggatgctgcsgtttgtcctcttggataactctgcttttctcttcgccagcgccacgatcatgtctctcgaagactttgagcagcgcttgaatcaggccatcgaaagaaatgccttcctggaaagtgaacttgatgaaaaagagaatctcctggaatctgttcagagactgaaggatgaagccagaggtcaggaggccttggtgtcttcaccagcatggtcccctctccctacctgagcaacatcttgtcccacaagctctcccagcattatctttacagggaccccacaccctgctctgcacccaggttgtctaatcagagggtgtcggactgcactgggcagactcttgccttgggccctggctggagctgagaacagtcagacatccagccctgtaagggccccttatgggtatttagagaaatagctttggggttcacagatgaagtccttgtattgggattctgcctctgggcagcagaatttatttccagaaagatgcttcctggtctgtaattcacaaacacagcaaactaccctgatgctcagtaggaacagagagttttgtggggagatctggcacagtggctcacacctgtaatcccagcactttgggaggccgaggatctcttgagcccaggagtttgagaccagcctgggcagcatagtgggactccatctttacaaaaacatttaaagattagctgggtgtgatggcatgtgcctgtagtcccagctactcaggaagccaaggtgggatgattgcttcagcccaggaggtggagtatgcagtgagctatgatggcaccagtgcactccagcctgggtgacagagtgagaccctgtctcttaagaagcaaagatgttgtggggagaaatttctggtggaattgccagctagcctattatttttgtgacttgatggcaaccaatatatttggctaaaactttgaaacctcatcagcatttgctctttttcagttggcacttccagaggtagaatgttgaaactgtaatgaggcatttggccaggcacagtggttcacacctgtaatcccagcactttgggaggctgaggcaggtggatcacctgagctcaggagtttgagaccagcctggacaacatagagaaaccccatctctactaaaaatagaaaacatgagggtatggtggtgggtgcctgcaatcccagctgctcaggaggctgaggcacgagaattgcttgaacctgggaggtggaggttgtagtgagccaaaattacaccattgcactccagcctgggtgacagagtgagactcttgtctcaaaaaaaaaaaaaaaaaaaagacattcattagtggattgtccaagttgtttttacctttttttttttttttttttttttttttgagatggcgtcttgctctgttgtccaggctggagtgcagtggtgctatctctgctcactgcaacctctgcctcccaggttcagcgattcccctgcttcagcctcctgagtagctgggactgcaggtgtgcaccaccatgcctggctaatttttatatttttaatagagrtggggtttcaccatgttggccaggctggtcttgaactcctgaccccaggygatctgcctgcctcggcctcccaaagtgctgggattataggggtgggtcactgttgctggcccaattaattatttataacgtcgatttgctttctaatgtgtaaccagtaggtgggggataaaaagtaaaaattcttaagtttaataaagtagttgttcctagatgtccatcagtaatgaagtggttaaatgaagtacatagatgtattttgtgaaatgttaatggttaaaatgaacagtagatagaaatgttgtggtagaaagattgccaaggctaggcacagtggctgatgcctgtaatctcagtgctttgagagacggacgcaagaggattgcttgagcctaggagttcaagatgagcctggacaacatagtgataccccatctctacaaaaatgaaaattgtaaaaattaggcctggtggcatatgtctgtagttccagctacttaggaggctgaagtgggaggatgacttgagcccaggagttcaaggttacattgagctatgattgtgccaccgcaccccagcctgggtgactgagtcagaccctgtctctaaaacaaaaatcattgccaagacataccactgaagtggggagagtaagtcatacacaggacaacatattgtatgtttccagtaatgcttaataaaaaattttcttgttttatgctcagtagatacatacatatgtataaagtttatgtttgaaaatggagagaacagctgggcgcagtggctcacgcctgtattcccagcactttgggaggccaaggtgggtggatcacctgaggtcaggagttagagtccagcctggacaacatggtgaaaccctgtgtctactaaaaatacaaaaattagccaggtgtggtggtgcgtgcctgtaatcccagctacttgggaggctgaggcaggagaatcacttgaacccgggaggcagatttacagtgagccgagactgtgccactgcacttaagcccgggcaagagagtgaaactccatctcaaaaaaaaaaaaaaaaaaaattcagagaacaatggttgaaaagctctcccacatgttatggtgatgatgagtgaggaggagcatttggggatagtctggaaagcatactttatttatttttgagacagtcttgctctgtcacacaggctggagtgcagtggcgtgatctcagctcactgcactcactgcttgtcccccaggctcaagcgattgtcttgcctcagcctcccaagcagctgggactacaggcgctcaccaccacgcatggctaattttttgtatttttaatagagacggggttttgccatgttggcctgaaaattcctgacctcaagcaatcctcccatctcgacctctcagagtgctgggattataggcttgagccagtgcaactggcctttttttttttttttcttttytttttttttttttttttttttttgagccagaggtctcactctcgcccaggctgaagtggtatgatcatggcttactgcagcctcgacytactggattaatgtgattcttacacctcagcctcccaaagtgctgggattacaggcatragtcactgctcccgggcatattttcatttagtgttctaaatacactgctatgttggaattgttttttcaataataaaagcattagtgtgtcactgtcatagctttttaaaaatctgaaaccattttgttagtcaagagaaacatcctgtagagttccaagtctgctrggcaaggtcctgtgggtttccctttatttggggtttctacctggagtgtttcaccccagtaggtcttttttctgactggtatctactgttgaacctctctccctgcaccccaccaaccctaagcaaggacttaaattccctttttgttttttgagacgtagtcttgctcttgtcacccagactggagtgcgctggagcaatctcagctcactgccaccctggcctcccaggttcaaatgattctcatgcctcatcctcctgagtagctgagattacaggtgcctactaccatgctgggctaatttttgtattttcaatagagatgaggtttcaccatgttggtcaggctggtctcgaactcctgacctcaggcgatccacctgccttggcctcccaaagtgctggcattataaacatgagccactgcgcctggctgaggacttgaattcctgaatcctttttctggcacagatttgcggcaggaactggccgtgcagcagaagcaggagaaacccaggacccccatgcccagctcagtggaagctgagaggacagacacagctgtgcaggccacgggctccgtgccgtccacgcccattgctcaccgaggacccagctcaagtttaaacacacctgggagcttcagacgtggtaaggggagtgggaattgcaggattttctcggttcacaaagtgtttctgggtaagaatctggggtgggtcctgggggtgtgatgatttgcatcaggctcagagcctgatttgctctcaggctttgagcagagagtagactgggatgttcttggggatgggcattgagatcagtgaggactgggtaagaggcagtagtggagtctgatgaaatggaaaccccacccagagcgggtggctgccactctgcagctacgaggattggcccttcatctgcagctttttccattcttcaaagccagaaatcctctttttttttgttgggtttttttttttgagacaggatctcactctgttgcccaggctggagtgtagtgacgtgatcttggctcactgcaacctcttcatcgtgggctcaagtgattctcccacctcatcctccggagtagctgggactaaaggcayctggctaacttttgtattttaggtggagacrcagtcttgccatgtcgcccaggctggtatcaaattcctggactcaagtgatccgcccacctcggctgatcccawagtgctgggattacaggtgtgagccaccgcgcctggtcaaaaatcctcttgttgaatataaaacctcccaaatttgaaatgtcactgaccaaatacaaaaaagtaaaaagcgttctgtgggtttagtaatacatccaccgagagctagactcagcgtaacgtgtgctgcatgggcagaaaaaaagaatctcagttctcaccccagcccctctgctgacagcttccgatcaggccttttacagcagatattaataacagacagttaaggagtgctcagtgtgtgctggccagcctgcagccttcgccgcaggcccaggatgcaggtgctgtccccgtttgatgaaagtgaggctctgagttaagcagagtcatgaagcaattgaatggcagatggtttgggattcagacccaggcaggcaggctccagggcttaccctaccatctactaccttatcccttagcttgtcccctgggcatgaagagaccagtgagacttctagaattccggtgcagagcccttctgtttagttttgttgagatggagttttgctctgttgcccaggctggagtgcaatggtgcgatattggctcgctgtaaccccctcctcccaggttcaagtgattctcctgcctcagcctcctgagtaagcttgaattacaggtgcccaccaccatgcctggctaatcttgtatttttagtagagatggggtttcaccatgttggccgggctggtctcaaactactgacctcaggtgatctgcctgcctcagcccctgaaagtggtggtattacatgtatgagtcactgtgcctagccccagtctagagccattttgcatactttatttcattgttgtttttagagacacagtcttggtctgtggcccaggctggagtgcagtggtgcaatcatagctcactgcagcctccaactcctgggctccagtgatcctcctgcctcagcctcctgagtagctgggactagaggcatgcaactccatgcctggctatgtttccacacttcaatatgcatgtagcttacctggggatcttggtagaatgtacctcagatcaagtgggtcttgggtggggcctgaaatttctttctctctttttttttttttttgagacaaagtcttgctctgtcggccaggctggagtgcagcggcattgatcttggctcactgcagcctctgcctcctggattcaagcgattctcatgcctcagcctcccgagtagctgggattacaggcaggcacctgttaccatgcccagctaattttgtakttttagtagaaacaagattttgccatgttggccaggctggtcttgaactcctgacctcaactgatcgaactgcctcggcctctgaaagcactgggattacaggtgtgagctactgtgcctggccgagagattctgcatttctaacagttctcatgtgctgctggtgcatggaccccacttggagaagagaggctctgcagagcgggacccttgtaaagctggatcatcctgtctatagttcttgtatctatcacagatgccattatgttaattaactatatggattttctacaatttcaaaaggatttgttttgggtttgtttaaaaagactaatgtggctgggcacggtggctcatgcctgtaaataccagccctttgggcggccaaggtgggaggatcgcttgaaactaggagttcatgatcagcctgggcaacatagtgagaccctgtctctattaaaaaaaaaatttgttaaaggccaggcatggtggctcacgcccgtaatcccagcacttttggaggccaaggcgggcagatcatttgaggtcaagagttcgagaccagcctggacaacgtgatgraactctgtctctactaaaaatacaaaaattagccgggtgtggtggcacatggctataatcccagctactcaagaggccaaggcaggagaatcgcttgaacctgggaggcggaggttgcagtgagctgagatcacatcaccgcactccagtccgggtgacagagcaagactaacatgtaaaaataagtatttgttgcagtcatcacaaggacttgaaaaattggttgtcatacgggccttgggtgtgtgatgcggttaactacggaaagaaatagggtagcttttgggatccgaggaaaggcgtcagtgtccctcctgtcccgtggttttggatctagcgatgttaacgcacagacatgactataggttggtgagttacatgctcttccctttgcacacccaggcctggacgactccaccggggggacccccctcacacctgcrgcccggatatcagccctcaacattgtgggagacctactgcggaaagtcggggtaagaccacactttcctggcgtttggtgccttcctgcctgtctttcaggatgtgtgaagggggttgatctagttccttccctctcttctttttttctttttttttagagacagggtcttgctctgttgctcaggctggagtgtagtggtatgatcacaactcactgcagcctcaaaatcctgggttcaagcgatcctctcaccttagcttcccgaggagcttggaccacaggtgtgcgccactatgcctggctgatactttcatttttttgtagtaatgtgggtatcgctgtgttgcccaggctggtcttaaactcctggcctcaagtgatcctcccaggttggcctcccaaagttctgggattacaggcatgagccaatgcgtccagcccctttcatagcagtgtggtgagttttaggtgtggctgctcctttagcatccctgggaatcattagagcttcctgtgggagttactgccagacactcagagctctgactcgaagccctgctctgaaccctatgtatgtctctttccttttaccgtttttcctctaggaaatttgggaaattagggtgatatstgtgttttttccttaactcgaaaaattaaggagcacttggaaactgccttctcttttggccgggtgctcatacctgtaatcccagtgctttgggaggccaaggtgggagattacttgagctcaggagtctgacaccagcccrggcaacatggtgaaaccccctgccccgacttggcctctacaagaatgcaaaaattagccaggcctgatggtgtacactggtggtcccagctactcaggaggctgagaggtgggaggattgcttcagcctgggaggttgaggctgagtgagctgagattccaacactgcactccatcctgggtgacagcacgacgttgtctcagaagagaaaaaaactgccaccytttttttttttttttttttttttggtttgtttcttggggtttaagtgaattttgacactttgggagaccgagatgggtggatcacctgaagtcaggaattcaagaccagcctggccaacatggtgaaaccccatctctactaaaaatacaaaaattagccaggaatggtggtgggcacctgcgatcccagctacttgagaggcttatgcaggaaaattgtttgaatccgggaggcggaggttgcagtgagctgagatcgcaccgctgggtgacaaagtgagacttggtctcaaaaaaaaaaaaaaaaaaatcttgaaagcctagggcaaagaatttggcctttcagcttttatgttaattacagggagggatccttttgtgcttaagtaaaaacataggtattctttgtagtttatttttaaaaatgatgcctagaaggccacataatttaactcctaccaagttgtcactgtacacagtgtatttgtagctacaacttaatagaagcttgcaactcatttcttttgtttttacttctggtttttggctgtctggtttgctattctagaagcaggtctgcatttcagtatttagcctagttggagtatagagaagcctggggtgctgtcagtgtccttttggtttcctcagggtctgttgtagccagaccaagtccttaccaaacttcttgccattctgcagaggtttaacaaggtaaaccaaagggtgaaggattccagaagtggatttcctacttcctacaagcggagttggataattggtaggttagtgatttttccagaaagctcccattttaaaaaattttttgtaattaaaaaagaattttttttttttttttaagccaagcatgattgtgcatagtcctagctattcaggaggctgaggtggaaggabtrgttgaggctgcagtgagccgtgatctttttccaggcagctcccaaacattttaaaaaatttttcgtaattaaaaaaaattttttgcattaaaaattttttttattaactgggcatgattgcggatgcctataattccagctgctcaggaggctgaggtgggagggattggttgagcctgggaggttgaggctgcagtgagctgtgatctcaccagtgcactccagcctgggtgacacagcgtctaaaaaagtaaaaaacaaaacaaaaaaaaaaactgagatgggatcttactttgtggcccaggctggtctcaaactcctgatgtcaagccatcctcctgccttggcctcccagagtgctgggattataggtgtgagccattgtgcccagccagctcccaaatacttaaggtgcttggttctgagactggcatatacgttggattcctcttggggtcccaccttggaattccagtgcacaacagtttgagaaccactgtctggggttcgttcttctgtacaggctctggtaagacagaatagtccttgcctataacttgagagataaaagtgtatttctgtccaggcactggagtccaaactcgcttcctgccggaacctcgtgtaygatcagtccccaaaccgaacaggtggcccagcctctgggcggagcagcaagaacagagatggcggggagagacggccaagcagcaccagcgtgcctttgggtgataaggggtcagtaccttctaataaacctctcgctggcggggagaacccgcctgccccaggcaagagacactcacccccagcccacagccatgtgtctttttaaattataggattatttcagcaaaccttatcctctcctctgctccctgcaggcagcattaggtggtgtcttgtggcttgaacaaagggctagagagagggtcttgttttgtgagacagggtctcactctgtcacctaggctagaatacgatggcaggatcatggctcaccctctgcctcccagctcaaacgatcctcccacctcagtcccccgagtagctgggagtacaggtgcgtgtcaccgtgctcggctaattttttgtattttttctagagacaggttttgccatgttgccgagtttggtctcaaactctgagcttcaagygatcctcacccttcatcctcccaaagtgctgcgacgacaggtgtgggctaccatgcctggccaagaaggtcatttttatcatttgattctacagctgctactcacggttacactgtgagaatgtcctgtataaaagcccttatttgggccaggtgtggtgacgctcgcctgtaatcccagcagtctgggaggccaaggcaggtggatcacttgaggtcaggagttcaaaaccagtctgggcaacattggtaaaaccccatctccaccaaaaaaaatagaaaaatgagccaggcatggtagcatgtgcctatagtcccagctactcaggaggctgaggaaggagaatcacttgaaccctggaggcagagattgcagtgagccaaaattgtgcctctgcacagcagcctgggtgacagagcaagactccatatcaaaaagttaattaattagttaaataaaaataaagcccttatttggggaattgagcatcagtcatggctctgcttcccctgaagtttttttttttgttttgttttgttttttttttgagacgtcttgctctgtcgcctaggctggagtgtagtggcatgatctcagctcactgcaacctctgcctcccaagtccaagcaattctcctgcctcagcctcctgagtagctgggattacaggcgtgtgccaccatgcccagctaattttttgtatttttagtcgagacggggtttcactgtgttaggatggtcttgatctcrtgacattgtgatccacccacctcggsctctcaaagtgctgggattacaggcgtgagccactgcaaccagcccttttttttctttttaaatctgtagaacctttgagaaactggcactaacttctagcccagactatgttcctgaaaccagccacccgatgggacagtrcagatctgatctctaacagtgtcattaattttcttgcctaaagaaaatcagggccaggctcagtggctcacacttgtaatcccagcactttgggaggctgagggcagcggatcaattgagctctggaggttgaggccgcagtgagccgtgttcccagccactgcactccagcctgggygatgaagcgagaccttgtctcagaaaaaaaaggggcagctttcagattcaggaattctgcaaggtgtgtgactaccatctctctgggccccaagccgtaggaatttgatgggtttgtagcagacacgtgacaggaaattaagaatattttccatggcatgcacataactttgagacctttacacgtggatttttaggccaggtgcagtgaagtggctcacacctgtaatcccagcactttgggaggcagaagtgggtggatcacttgaggccaggagttcacaagaccaaactgggcaacatggtgaaaccctatctatactaaaaatacgaaaattagccgggcatggtcgcggatgcctgtagtcccagctgcttgggtggctgaggcacaagaatcacttgaacccaggaagtggaggttgcagtgagccaagattgcaccactgaactccactctgggcaacagagtgagactctttctcaagaaaaaaaaaaaaattaatttttgtttgttttctttctacgagacagggttttgctgtgtcacccaggctggagtgcagtggtgcgaccatagctcactgcagcctcgtcctcctgggctcaagccatcttcctgcctcagcctcccaagtagctggggctacaggtgcacaccaccacccctggctaattttttttatattttatagaaacagtcttgctatgttgcccagactggtctcaaacctcctggctttgagtttgagaatacacctctgagactgtagtctgcttctcattgagatttctagaggtgagttttcagattaattttccaggcgatcttcccaccttgacctcccaagtgctggggsttacaagcgttagcaatcatgcctggcctttttttttttttggagacagggtctcactctgtcacccaggctaractgcggtggtgtgatctcggctcactgcaacctccgcctcctgggctccagcratccttccacctcagcctaccaagtagctgggactacacatgcaggccaccacacccagctaatttttgtttgcatttttcatagagacagggtctcactatgttgcgtaggctgtaaaacaaacaaacaataggtaagagatggatttttctagtgggtctgagactgggcgttttgtgtgaccttggaatctgagagccaggtagccagtgtcctcttcttcatttcacaggagagaaaattgagaccctgtgagaccctgctcctgactcttgatgttcacccttataactctctgggccccggtgctagccagtttgtcacagctgttatgtcagcttaatttggtttgctctgtctgaaggttggggaagcgcctggaatttgggaagcygccttcacacatgtcttcatcgccgctgccgtcagcccagggggtagtcaagatgttgctttaggaaaaccacggaagctgaaggtcttggtgttggtgcggaagtcgttaccttttgtcgtctttttacactaggtttttgttttaagttagtttgagaaataagagcagtcaccatagttagttagctttgcggcccaagccaatgaccgaggccatcacctgtgctctggggtttgtccctgggaaatgtcttttcatccttacctgccaccgtgtgcattgcaaagagggacaaaaggggctctctgggaagggctctaagttgtcggtgatgaggctaccgtgttgtttttgagatagagtcttgctctgtcacccaggctggagtgtggtggcgtgatctcagctcactgcaacctccgcctcctgggttcaaacggttcttgttcctgagtcttccaggtagctgggattacaggcacccaccaccacacctggctgaattttttgtatttttaatagagacggggttttgccatgttgcccagtgtggtcttgaactcctggcctcaagtgatcctcccatctcggcctcccagaatgctgggatttcaagcatgagccatcgttcccatgccccattgtgttgcactaacccaagcggaggtcctgattggtcttttttttttttttcttttttgagacagagtcatgctcttgccctgtcttgtccaggctggagtgtagtggtgcaatttcggctcacygcagcctccgcctcctaggttcaagcgattctcttatctcagcttcccargtagctgggrctacaggagtgtgccactacacccactaattttgtatttttagtgagaaacggggtttcaccatgttggccatgctggtcttgaactcccggcctcaagtgatcctcccgcctcagcctcccagagtgctggaattacaggcctgagccaccgtgcctggcccctgattggtcttgacaggtgtttttaatgtcccaagtctccgtaaatgtgggatggagcttctctcagaggctcttccccccaactcccaaccaggtggaatcgtcttccagaacaaaatctcccagtgctttgtggtgtactgaaatcatgtctaagaacagagaacttaacagtcacatgcctttttaaaaactggaataggctgggcgcggtggctcaggccggtaatcctaagactttggaaggccgaggcgggtggattacctgaggtcaggagttcaagaccagcctggccaacatggtgaaaccccatctctactaaaaatacaaaaaattagctgggtgcagtggtgcgtgcctataattccagctactccagatgttgaggcaggagagttgcttggacccgggaggtggagggtgcagtgagccaagatygcgctactgtactccagcctgggcaacagagtgagactccgtctccaaaaaaaaaaaaaaaggtgtcataaacctctgagactgtagcctgcttcttagcttctcattgagattcctagaggtgcgttcgagttttcagagtaattttccagaccaaccagcgtcagtgggaaatctgacctcttttggcaaactgcgatcattcattttcctgagtcccctggtggggtggggggaattctgcctcaggaccctgaggggtctttggggcaagatggccttggtaatgcagccactaagaacaggacttcattcaaaggcataatgaagtaaccagggtgaccatcaagtaaaattaaagcacaagatcattgtaggaggcttccttgtcaaagacgtgaacgtgggatttccaacgcaccayggtgtgtccactcatcactgcatgttaggaactgctgtctctttgggacacgagttaaaagaacacactaatttctggagtgtgcctgcagcttcacggccttcattttgttactaagttattttctggaagaacagcaaaaatttcaggttgaaaacagaactttccaagtgctactgaaattccgcagagaattacgctgcgatggtgggtttcttaccctagaaacatcctaacctgtatccacagaagatgtccttttatttttttaaaagatcaataaaatcaagagaaacgaatgttgaacttgttgggcttctggtcaaagaggctttgtatgtttatactttaatgttttcccacagagtggtgaaaaactttttttaaccaagttaaaaaatatgaaaaaatctttttgaaaatttctattcaagccaggtttttagaaatgtatccgggatgtgtttgtgcgtcattcaaggcatattagcatctggtcacaakatggagtcctttgtttccatgtttcctgtctcccaaatctgtctgatcccatggagttggtggtatacggcatcgtttgtgttgaacagagcctttgcaggcatgtctgtctaaaacactcaagctgaaagaaggacagggcctacagcttgtttttatggcccttactctaagaatgatttattatgtttttaagggttgttttaaagaagatgaatattcggcaagaccatatgtagcctgtaaaggctaaaatactatctggctgggtgggtggtggtggtggtgtgagagacaaggtgttactgttacctaggctgcagtgcagtggcgtgatcatagctcactgcagcctggaactcctggctcacatgatcctcctgccttagccttccaagaggttgggagtacaggtgtgcactatcctgcctggcttactaacaacaacaamaaaaaaacaccttttttttatagagacgggggtctctctcggctaggctggcctccaactcctggcctcaagtgattttcccatctcagcctcccaaagtgctgggattccaggtgtgagccactgtacccagccaccatytgacgttttgtggaaagtgtttgctgactcattggacaagaccttgtgttttmactcaaaaaatcaaggaaatcctgtatttttcttaagatactggttttgatgagtcaagatgttcttcccagtcatgttcgagggcagggggcagtggcccttagaccacacatcaccttatttctctcccctgccctccctgctgagcggcccagtaacccccttagacagtctcactttgcatctctgctctgctctctggctggctgtggggttgtaggcaattgatttcacctctctaggcctcagtttctgcattcatgacgttaaccctgacttcagagaatctttgggacgatgaagcaaaacccagccttccccaactccttttcctctatagaaaacagctcaacagaaaagccaacgacattgtgatttataaccatttattagtgaaagtgtttttaagcacagtcagggtgtaaacagtgcagcattcctgctcccctccgtgggagcagcgtctccttttcaattcatgtractacagaaggcacttggtgaactgtgcgtgtctgaggtgtggaaaccaggagagggggaaagaattctcaaaggcctgacgtgagaagttggaaaggtttgcaggttagggaatgaattgggagtgggggccggcggcacccatttcggtgactttctccccatttcatgtaaacagaattgccagggaccggttaccgtggatatgtttttctaaaaactcagtgtctgcacaatccattgatagaactggaggatgtgtctgtgtttcctgttgggtttttctcatctcttacatcatacaaacttcaatttttaccttsaatacaggggtagtaggggtggtggtggtggtggtggttgagacagggtctctgttgcccaggctggagtgcaatgatgcaattatagctcattgcagcctcgaagtcctgggytggagcgttcttcctggctcagcctccctagtagctgggaccacaggtgtgtaccaccacgcccagcttatttttaaattcttgtatagatgaggttttactacgttgcccaggctggagggtggtggtttttatattccttgtgtgaggggtgtctgtgatatttggaatttgagaatggatttagacaatgctaagtacagtctgctgggttttgctttgttctgggttgttgttgggttttttttgtttgtttgttttggtttttggttttcttgccgtggtgcaaaactgtagaaavttgcttattcactggccttggttccattgaagtctgcgtctcgagtgtccgtttcctcctcagaaccatctgcattttcaataactctacgtcctccagaccttctagaaggaacgaaagaggtctcgtttcctcgcctgtgggttgtaagaaaacacattatttagcaaagaaatcttcatggttgggatagattttttataaatctattttaaacttgtagctatagtcctattgcaatataaattttttttatggcagaaaacacacacggcacaaataagatgcagatattcaagttgaagtcaacaaatcattgccagtcttaaggcatgagtgattgaatttaatcagctgaaattggttkcgggggtgggtggagaaggtttttcaaagcaagacgatctgcttttcaatatgtcaggcttggtcatttgagaagccacaggattctggtctgctgtggtctttgatttagaataggaaaaaaacgccaaaaaccaagcaggggattttgtcttctgactttattcatagcccatggggcagagttgaagagagaacatactgtttttcttctgtatctcctcacccccattcgccttagaggtgagttttcaagatttgaattggaagaaggtgaaatggacaagggcagccttgagaaggacacagaggrgctccctggttaaaaggcgagacagcaccccctgctggtgtgaatgttcatggactgagttttccccactgcagggactgctgcatctgttttgctgatcgtggaacataccgcacatggcgtaaaacaggtgcccagtgaatattagaaaaggaaattatacgtgttaatccaaggtggattattttattaaattgagatgaggtcttgatattgttgcccaggctggtctggaactcctgagctcaagcagttctcctaccttggcctcccaaagygctggcattacaggcgtgggccaccacacctggccttcaaggtggatttaaaaaagaaatttaagagtctctctcacccaggctggagtgcagtggcatgatcttggctcactgcaacctctgcctcctgagttccagcagtccttgagcctcagtattgagtagctgggactacatgcacytgcacactgccacgcctggctaatttttgtatttttagcagagatgggattttgccatgtgacccaggctggtcttgaactcctggcctcaaacgatccacctgtcttagcytctcaaagtgttgggattacaggtgtgtgccagtgcacctggcctctgaggtggattttagctccagccagtaggacacccctgtctctccttaatgctgccatctcctctctgcgctggttctctcttgagtttatcacctcgacttcacaggaagggctggtcacgtgaggggagactttgggtaggaggaagagagtgggcagragaaggaaaaatcagatctgcctgctgccagccttcaccgttcagaagaaacacttaactcttttcagcaaccgcaacaaataattatgttgggctctggccatctggccctgtttgacctgaatcggaagacaggtcttattttaggacatcaaagaagagagcagacttttgctccccacgcaagggttggataagaagccataaggatgaacacaactcagtraccaattctttagtcaaaaggaacaactcggctgggcatggtggctcacacctgtaatctcagcactttgggaggctgaggcgggcggatcatgaggtcagsagatcgagaccatcctggctaacatggtgaaaccgtgtctctactaaaaatacaaaaaattagccgggcgtgctggcgggtgcctgtagtcccagctactcgggagggaggctgaggcaggagaatgacatgaacccaggaggcggagcttgcagtgagccgagatgtggccactgcactccagcctaggcgacagggygagactccgtctcaaaaaaaaaaaaaaaaaaaaatcaaggcccagagattcatgatcactgagaagaggaattcgcaaatgacccttttgttgacagaggatgggagagaccccggctgggaaagcccacctggctataaaggatgggacttcccgcagtgcagcgatcaggaataaatacttaaagctgcagccacttcaaagtaaacactcctagcccagcttcacagagaagcttctggacttgcagccctactagagaactctccatccttctctctctagatgtgacccttaagtctttttcttttttagcactgttttccaagcgcttgactcagaaggatgctcaaattcagcgcagaggagcagcagtttgactgttccctgtacgctccccacacagctctcttcgtcacagttttaactccaggttcaaaccctgatgggttggccagttgctgcgactcatgcctgtaatcccagcacttggggaggccgaggtgggcagatcactcgtgaggtcagttgttcgaggccatcctggccaatatggtgaaaccccgtctctactaaatatactaaattagccgtgcgtggtggcaggcgcctggaatcccagtcactcaggaggctgaggcaggagaattgcttgaacccaggaggtgaaggctgcagtgagccaacgttgtgccactgcactccagcctgggaaacagcaagactgtctccaaaaaaaaaaacaaaaaaaaatctgatgagctgggaagtagtccctaacctccacatcagtgctctaggcactctctttttggctcttggaagagtctatttgctaactggaaaagcttaatggataaatttgctcccttgacctaagaaatacattgtgccctgggccgttgaagctccttgcttggctgtcagcctgcaagatactctgttttggctgaagtgcttttcttggaactggtttcaaatcctagaccaaggttgacaccaactatacctgttacaggaactaagggacccccctaaaggttttcttaaagggtctgatcctggagaatctggaatttttttttgaaatagagtctcgctgtgttgcccaggctggagtgcagtggcgtgatcttggctcactgcagcctctgcctcccaggttcaagcgattctcctgcctcagccttccaagtaactgggactacagacatgccaccactcctggctaatttttgtatttttaggagagacggggttttaccatgttggccaggctggtcctgacctcaagttatctgcccgcctcggcctcccaaagtgctgggattataggcatgacccactgtgcctggcctagcatttggattctattcgtggactcagcttatccaaggcctcgggaatcatcttgagtgtaagcacctgctagtttgcaaggactcagtttcccactgaccagtgggttctgcacttcagcccaccctggaatttggcttatcctatgatcccaatcagctggtaggagagctgcttgaagtgtcctagaaactcatctgctcccccacaaaactggctcttaacaagacctcaccctgcgctttaagtattttggtagtgacagcaaagctgagattctccaaaaatgaagatggacacaaatgagggttggtttggcctctccatgaggtgaagtcagatccacatggcctaacttcacctgtgaaaagttggtcatgcttgtaatcccagcatttggggaggccaaggcgcgcggatcacctgaagtcaggagtttgagaccagcctggccaacatggtgatatcctgtctctaataaaaatacaaaaattagctgggcgaggtggcgggagcctgtaatcccagctactcagaaggctgaggtaggagaatcgcttgaacccaggaggcaaaggttgcggtgagccaagattgcgccattgcactccagagcgagactccgtctcaaaaaaaaaaaaaaaaaaaagcaaaatcccagagcagcagagacctcttcatgctttcttgggaagggccctgtgtgcatccttgagtcttgggtatccactccccagtccctgaacatgtacatgcccgtgaagcctccagaaaaggctctgccaggactgtgcttggctttgcggtggtcagcttccaccccgtgtgctgaaaatgcagtttgtagctagacatcactcaagccacgtgcagcccccggcatttgtcagacatcgcagtgagctcatttccttcgcagacaagcctgtgaaagctgaatcatgggaggactggttgccgcgccgcagttaccgtgaactttgtgatctctgacttgtgacccagaccagccaactagaagccaagtacgttctccaggaatgtgcccagatagtggaactgtcatattcattcagtgcagtgtcttcactggacaagggaggacagcactgctgagtgccctaaccacgtaagagtggcttttggyatgaaaggaagaaaaatccaagctacacacacagcctctgccatctcgtcaagatgcagtgataagggcgcacactgttgggtgtcatgtcacatgtgctgcccagaggcaggaaggacagtgggtcaagagatgaggtctatttgtcatcctgatcttggtttcaatgaaagctttgcacaaagatatccaagcctccagattttgcaagaatctcrtggaaatgtgcaagggtttaaaaattggggtgggcagaggggcgcattgggcagaaaagaaatggatactgagacaacacacagctgcgaagctgaaggcatgatacctggtgcatcactgcgaagtttcctgtggggggggccctctgaaacagagagagaatccccggaggttaccatcagcaaacaagaaggagcccggttaagtatattcttaattgttaaagacatttgcttcgatttaataattaaaggcactcttttttattttgagatagtctctgtcacccaggctggagtgcaggggtgcgatcttggctcactgcaacctctacgtcctggattcaagtgatccccttgtctcagcctcccgagtagctgggattacaggcakgccccacgtgcttggctaatttttgtatttttagtacagatggkgttgcactatgttggtcaggcttgtctccaactcctgatgtcaatgatcttcctgccttggcctcccaaggtgctgggatttgggattacaggcatgaaccaccgcacctggcattaaaagcacccttaagtcaacgttgcagtgaatcacctgacgccaagagcatttggtgaggctggtagatgaaaggataagcagttttttgatactctgtcacccaggatggagtgcactggcatgatctatctctgctcactgcaacctccacctcccgggttcaagcgattctcctgcctcagcctcccgagtagctgggattacaggcatgcaccaccgtggctggctaattttcatatttttagtagagacggagtttcaccatgttggccatgctggtctcgaactcctgacctcaagtgatccacccacctcggcctcccaaagagctgggattacaggtgtgagccactgcaccyggctcagttttttaaatggaaaggaaaatgtctgtcctttagagctacttttaagaacctcctataaatcccatgattgcatactggttcagggaagtaaaagcatttgagcaagctagtttgagaaatcagtgttggaacagaagccaagaagtcccaggcaaggaacctgcagccgcctgtcccttggtttatgattacttgctcttcattagctttcgggcctctagcaagagaggagaggtggaggccttgtacagctcttgccggaggtaactggcagtgtagccagtggtaggtaagtgggtctggctttagagagggcttgtgtcgagatgcgtctggctgatagaacttggtgaaactcgcactacagttccttcttggctgaggagccaggcatgcttaccaacctccctcagggctctagtgcctgattttatgtttttgtgcacccaaaagatgcagaaggcaggacagaccttccacctgcattatgtgtgtattcgtgtcggaactggcaaaaatggtctttttgttccactttgcccttggctgcccaagaaggctcaagtgtctggggcagaacccacaggaggtgtccagtgtgtgctaaagaatcactgggccggccgggcatggtggctcacgcctgtaaccccagcactttgggagaccgaggcaggtggatcacgaggtcaggagatcgagaccatcccagccagtatggtgaaaccttgccactactaaaaatacaaaaattagccaggtgtggtggcacgcacctgtaatctcagctacttgggaggctgaggcaggagaatcgcttgaacctgggaggcaaaggttgcagtgagccgagatcgcgccactgcactccagcctggcaacagagctagactccgtctaaaaataaataataaaaagaaaagaaatcactgggcctgagaaagggaagcagagacagcagtggggtagggagtcagagtggctgtatccccatcgctcagcccagccactcaggagaggcagggggactggttgccagcagagcacatctgagggtttttgttttttgttttttttttggagacagagtcttgctctgaaggctggagtatagaggcttgatcttggctcactgcaggctcctcctcctgggttgcaaaggagtgtcctgtctcagcctcacgagtagctgggattacaggcatctgccaccacgcctagctgatttttgtgtttttagtagagatgaagttycaccatgttggccaggctggtctcgaactcctgacctcaggtgatcagcccacctcagcctcccaaagtgctgggattacaggcgtgagccaccgcgctttgccccaggagtcttcacagtgagaacagctctcctccactgacccctcaaccctgggagatgcttccaggcccctgctgtactttgggagcctaggcctggtttctctcctatccatgggggaccaacaagcgctcaccatgcagcgagtggggcttttccctgaaggcttggtgccctgcgccagctgctctcttccccttctcagaggggtttggacttttccctgtctcacgcagtggtccccaaactctagaggtgatttcagatggcttccgggcatgccatccgctaactgaactgggccctgagaaagtcatttcctttccaactctttttaaacaagtctaattatgatgtcagagagagtctatttggtgctaatggctgttgtcactccctttttagtggagaagtaggcttcaggtcttggtgatcaagttgtggccacaatagctagatattgaacttgatactatttttatcatattactttcatcgtaaccagttgatagaggtgatgctggtttaaaaatatagaggaggtatgtttatttgccgttatattcatgtatgattaaaactgttaaaagatcaagtcattggtattaaaggtagtaagaggctcagcacatggctgtggtggtatgagaatgaagcggggaaaatatctaggacccgagggataaaggttcactctgcctggtgctgtcctagacactggagattttttttttgagaccgagttttggtctgtcacccaggctgaagtgcagtggtgcgatctcagctcactgtaacctgtgtctcccaggttcaagcgattctcctgcctcagcctccctagtagctgggattacaggcacgccccaccatacccggctaatttttgtgtttttagtagagacggggtttcaccatgttggtcaggctggccttgaactcctgacctcaggtgatcagcctgcgttggcctcccaaagtgctgggattaaggggtgagccactgcacccagcctgggcaggattctttagggaaagttgaccagattctcccatagatgggatgtggggtataaaggagaccaaaacgttaagaaggaccacgaggtttgtgatgtgaattgttggcaacttcatcattttagctgctgagctggagagaggagccagtttgggggtgaagagtttcagtcaggacttggggtgcagcatgtttggtgtgagctgcctattagacatccatgtgggaacgggagggtggtctgaggttctaggaagaagctagggcttctcagagatgaactgaggagtcattagatatacatggaattctaaagcgccaagattagttgagacctctcacctagcgctggggagagatgaaaacaactaaggccgtgcagtggtccatgcctgtaatcccagcacgtggggaggctgaggcgggtggatcacaagatcaggagttcaagaccagcctgggcaacatggtgcaaccccgtctctactaaaaatataaaaataggccaaaaatagcttgaactgggaggcagaggttgcagtgagctgagatagtgctactgcactccagcctgggcaacagagcaagactctgcycaaaagagaactaagttgataccctggggcggtctagtggcaagcaggtttcgaggtgagggatcagcagaggagaggaagagggacaaccccacaggtcgggggacaagcaggtgtggatggtgtcggggaagtccagggaagcaagtgaattaggccagaggcatgatggactgcgtcacgtgctgctgccctgtcaggggacctctggccattagtgtcacccatgggaggcttctgggagagtgatgggtgggggcgaggggaaccagcaactcttcacatacagttttttttttttttttttttttgagaccgagtctcactctgtcacccaggctggactgcaacctctctctcccggttttaagccattcttgtgcctcagcctcctgagtagctgggactataggcatgcaccaccacacctggctaatttttatattttttggtagagacagggtttcggcattcacatccagttttgtagtaagggtagcaaggtagacatggggctaagaggttattccatttgctgatggagcaaatgaaagagaaaaccttgcaaaataaggatttttggagctatgtgcttgagtgaacaagagggtcgggtccaatggaggtgttggcctcggttggtgccagagggttcagcatagaaatggaaaaaaaatagaagtgtacagaggtgcacggaggtaggrtgatgaggcagtgggagcttgtgcacgtttcatgatcatttctgcttttgagttaagtaggaagtaaggtccccagctgagagagaatggggaggagcgatcataagttcaaagaaaaagtgaaaagcagcagagagtgagaagatgagggaggggtgtgggaggacccctgagcaaggcctgctctgtgggaaaaggtggagagtgggttttgggttttttgagacagggtctcactctgtccatccagggtaagtgcattggctagatcatggctcactgcagccttgacctctggggctccactgatcgtcccacctcagcctcctgagtagctgggattttaggtttgcgccatcccacctggctgatttttgtttgtttgttgtagagatggggtcttgctgctcttgaactcctgagctcaaagcgattcacctgccttggcctcccaaagtgctgggattataggtgtgagtcccgtgcccagccaagcttgagtttcatttgggttgtgctttcaccaaaygattgcagcaatgcaagagggggaaccggatgttgaggatgcgcgacgggggttactagacagctggtttggagctgggtcagaggctgatggcattaatggagtgaagaccccgttggggacagagccaaagaaaggtggcaccaggcagacaatgggatgcctgagggtcaaattgtgagggctcctaggagtactggttggcccggtagaagcagcaggatcacccagagggtcaaggaaccgagaggctgcgtcgcccacctggatgttgaaatcatggagaactgtgaggagtggtgtgggagacaggaagcccggagctaaaacctcctgggagccaatcgggatggatggacagggtggtggaagcagcccttgggagcaggggggacccccaaggtaccagaggcatgggagagaaaacagcccccactccagtgacagcaggaattctcagcggggtggcagtcgtaccctcccatctctagaggacttctggcaacatctagagacatttttggttgtcacattgcagggtggtgggggactactgcagccggtgggtagaggccagaaatgtaagcacctgctacttttcagggatctttttccttctgatggggaatgtcggacagcccccatacccgagaataatgcagcccagatggcagcagtgctgagggggagaaaggaggagcagagcatgtcaggaaggaggtgaagtggcggggggtggtgttgcagcttcaatggatgtcgtgaagactcagtgatgcaatgaaggaggggctggaggagacagtggggatagcctcttcctcctcctcagccggaggaccggatgggagacggtcgatcgttaaaggatctagaaggttagctgctaccaggcaaggcagggcccgggtctgatctcagtgcctggcccacactaagcttagtgattaaggagaagcaggaataaaccacagaagggagtggcggctgtgggcacaaggggcatttgcaggccgaaaggagcccgagcccccagtgcttttctctggcctgagagacggggtcctcccgggccacgggctcctcacctgagcttgctcttgagtgcgttcacctcgcggcccatggcctcgttgctctccgtggcctcatccagctcccgctgcagcttcctgcggttggcgttgatgcgctgggactcctcctctgcctcctccagctgcctcttgagctgcttgaccctggcattgcctttctctgcctgtcgcggagagttggaggggtggttaggggaggccggctgggggctgggggctcgagggaggctgggtggcaggggctacctgctccttgtactgctcggccatcttgcgctcgtcctccacctgcagcaagatttccttcagcttcttgtctttctgcttcagcgacttggtggccgcctgtttctctctgcaaacagcaaggaaaacaggtggtttcagcggagggtggcaccccttgtagctggtgtgtcacctggaggtggcatcttgagtgctttcctgagccccgtatctggactcctctcaagaatcagtcagatggtggaatagtattcagccatgaaaaggaataaagtatcaatgcatgccacagcatggatgagcctggaattcttgccaagtgaaagaagacacatagcagacaacatagtgtgtgattccgttgatatcaagtgtccagaatagataaattcatagagacagaaagtagattatggttgccagggactgaagggagtggttacagggcatggggtttctattttttttgcggggaggaggcaaggtcttgctgtgtgacccaggttggagtgcagtggtgctccaatgcctgctcttcaccctagttcatagttcactgcagccttgaactcctggctcaagcaatcctcccacctcagcctcccaagtagctgggactacaggcgtacaccagcatgctcagacttttaaaagtttttcatagaaacggagtctctggccaggcgtggtggctcatgcctgtaatcccagtactctgggaggccgaggtgggcagatcacctgtggtcaggagttcgagaccagcctggccaacatggtgaaaccccatccctactaaaaaatacaattacaagctgggtacagtggtgtgcacctgtagtcccagctacttgggagggtgaggcggaggttgcagtgagctgagatcgcaccactgcacaccagcctgggaaacagagtgagactatgtctcaaaaaaataaaaataaaaaagtcttgctatgctgcccagactggtctcgaactcctggactcaagtgctgctcccacctacctcagcctcccaaagtgccgggattatgggcatgaaataccacatatggcctggggtttctgtttgagccgatgaaaatgttctcaaaatgactgtggtgatcgtttttacatgtttgtgaatatatgaatagcccttgaattatacactttaaatgggtgcattgcagggcgtgcgaattactgaaaaagctactagaagagaatgggtgagaatccttagaatccaatggtaagaaatgtgctgtgatcatatgcctcattcgacccataattaagaaggcttccagtgtgtgtaccaaatgggctgccggttggacttttgttttttggggttttttttgtgtgtgtgtatgtgtgtggaagggtcccactgtgtcacccaggctgcagtgcagtggcacaatctcggctcactgcaacctccacgtgtcacgttggagtgattctcctgcctcagtctcctgagtagctgagataataggcatgtgccaccacactcggctaatttttggtacagacagggtttcaccatgttggccaggccggtctcaaactcctgacctcaagtgatccacctgcctcagcctcccaaattgctgggattacaggcgtgagccaccacgtccagcctggttggatttttgatctgtcagcatgctatccctgcagaggctgggaaaagtcatatgtactgctgggaaggcaggttaatgtcaggaggaccatggagatgctaagagcagctcacacttyaggtgcttgccctaggccaggaaccagcagggcactttgctgtgtttacgttcagttctcacaacatacctgcactgtaggcatcacasagcttgcttcttacaagccagaactgatgctggaagaggttccctgacttcactatgactcctgctgtccatcacccccctgcaaactgggttcggaactccacacscgcatacctggcctcctgctcgacctgctcctcyagctgtgcaatcttggcctccagcgccgcgatggtggayttgaacttggacttgacggccccctccatctcgtggagcttgctccggagctccttgttctgccgctcragctgctgccgggcactctcattcttctgggccgtgctgcgctctgtggccagctcgttgctgagctgctcggcctggggaggagagtgaaggccatgaggcggactcagggaagcccaagasagcgcactgagaccatgcctcttcctgccttgtttggcctctgcacgagtcccttgatcccgggcaccctgtcctctccttcatcctgtaaaactccactcaagagcttcttccaggccgggcgtggtggcgcacgcctgtaatcccagcacttttggaagcagaggcaggtaratcacttgagctcaggagttcgagacctgcctggccaacatggtgaaaccccgtctctattaaaaatacaaaaattagccgggcagtggtggcacgtgcctgtagtcccagctacttgggaggttgaagcaggagaatcccttgaacttgggaggcagaggttgcagtgagccaagattgcgccactgcactccagcctgggccacagagagaccctgtctccaaaaaaaagaggtgcttccacaagtgtcagtgccacccaggctgagcgagtgacttgtcccttgctttctctgtcctggagtcgcctggagaatgatgcctgttcaccctacaccacaaggggctgcaggttactggatggtccctagtgcccaccatggaactagtgctcagtgacatcaccaagggctcactggataaggtcagagcttcagctaggggaaaacgcaatgaaagagcatcccaaggcccggactccagggatggccgtgaggtacggggagccagccacgccgtggctggaaaatgagacactgcagcgtggagaggagtattctgaagacagcagcctgggcactggtgtaagggccctggatctctactctcaggccccaccaccctcttgtccctcaatccagggcctgcacacaggaagccgccacgcrtgtgttgactggtgcaggatcctgctgcaggagagacagtaggcagcgtgactgtggtgtccaggcggccctcacctgctgtgtggctttgcggacccggtcgctcatggcctccatgttgccctgctcctcctccagctcctcctccagctgggcgatccgggcctccaggcggcgcttctcgtcctggagtgcgttcctgggggaagggcrgccatggtgggggcctctaccctcccccgccttaaaagatgcccmctccttggagtcatgcctcaggggtattgccctcatcatctaatgggtgaaactgaggcttggagaagattagaagactcatctgtagttacacagccaggaagtggacagccgggactcaggccgggtccgtgtcagcaaagctgggattgggatggggaccagcacactcctccctgactcttcctggcctccccttctccccacacagctacttattgggaatgaatgaaagcagccacacccccaaacaggcatgaaagcgctgacggaaaacctaaccaccatgggtctgtccccaatctcagaggacgcttcgtcagcagcagcattgaaatgggggtccagggccaggcacggtggctcacacctgtaatcacagcactttgggaggccaaggtaggaggatcacctaaggtcaggagttcaagactagcctggccaacatggtgaaaccccacctctactaaaaatataaaaattagccaggcatggtggtacacacctgtagtctcagctactcagaaggctgaggcaggagaattgcttgaacctgggaggtggaggttgcagtgagccaagattgtgccactgccctccagcctgggtgacagaatgaaactctgtctcgaaaaaatttaaaaaataaaatgggggtcgaggatgctgcctgtccccccatcctctgcttcagagccctcttcctccattcagtttcctaccttcccgacaggctactggccagctcctctgccagttcctccttctcgaggtccgcttgtttgcgagccctctcagcggcggcgaggtcctaggtgggagggaggaaggctgttgtctgccagggaaaggccaakccccaccaagagtccaccctgacaactcagccacccttgaaagtacatgttcttcctctgagctcaggggaggccccgtgaatacatagaggagggaagcgtgtgtctttctagacaggtggaccccagaggaggacgaaatgaaatctgggaatgcacagactggagctgccaaggggtgctaccrtgacacccgcatctgaggctctcctagcaaggcgaggctttacctcttgtagctgcatgaggtctgcttccaagctcttggctttcttctcattctctttggctgtggcaaagatctcatctctggaggcacgggcatcttccagctctctttgaaagtccttcatctgagcctgcatgagtcaacagggaggacaagctcagatgtccttactcccccaagttctgctgcccarttcagctttgcacacccaccccttggattttctgcagttgaccacaaagaagttcccattgcacgagcatggctctcagttccaggtggctggtggtgcgctgggagcaccattctgggtgggctccacagacctgcctgagaagctgagcccctgatgtgatctgagggcagtggccaaatacctaataatgctgccctacccagggcaggagacagccaccaaatcctgaatggttccagaaaaaccccagctgaacccacaccaatggcaggtgcaggcttgcttcctggagcccgctctgctgacttyggtggcctgaggggaactgtgccctccctccacccatgccccaagctcctagtgtcacccacctgcagtttgcgtagctgcttgatggcttcctccctccccttgatggcagagtcggcctgaagctccaggtctttcaggtccccttccagctkcttctttgctgcagctgccagggcacgttgctttcgctcgtcttccagttccgtctcatactcgtgaagctgggcgaggaatagagatgtgtgctgccccacttgcccctgggaggtcctttggctcacctaggcagcacatcactgcaccccttccccagcacagcccccttgtgaggtgggcatctcatccccagttgcagatgagaaaacggaatcacgccgggcgtgggtggctcatgtctgtaatcccagcactttgggaggccaacaggagaatggatcacttgaggccaggagttcaagaccagcctggccaacatggtgaaaccttgtctccactgaaaaaaaaaaaaaaattagctaggtatggtggcatgcgcctgtaatccaagctactcgggaggctgaggcaggaggtggaggttgcagtgagctgagattacgccactgcactccagcctgggcgacagagcgagactctgtttcaaaaaaaaataaagaaaacgaagtttccacaccaaccatgagagtggtgataggaatgaaaaaggccacccgacctccctctgctggcctmcccggcagcacrcacctgtctctgcagttgcctcctyttctcctcattctgctcgtcccgggcttggagatccctttcgaactggcccttgagcgcctgcatgttgacttccagccgcagtttggcgtcctccgtggcttgcagctcgtcctccagctcttccagctgcgtcttcatctcctccatctgggtctccagggcccgcttggacttctccagctcatggacctgccggcagagcgggcagccccattctrtgaggctcaacttcatgaagacgattgagaaacccaccgtgagcggcacctcaggagatcagggaggtggctttggcctcccacaggatgcatggccgggactcaagatgacccctgagagttcagaccccagccttatcctcggaccccccaactcagacccatcctcgactgccattctcagcccctcccagcccctgcaccagtccaaaaacctccttccatttccgatgatagttcgctatgaaaaaggccaggagctagcctcgcatggactggtgaatagcacagagggtgggcaggcgaaacatggacgagaaaaaccacccagagccacttacgttcttgcccacgtcatccttggagctgaccaggtcttccatttcggctttgagcaytttgttggtccgctcgagttcctctttggcttccaaggcctcttcaagggcccgagccagggacagggccttggtttccttctccctggcttctgcctcagctctgtccctctcatccgcrtatttggaagagatgtttttctcctcggctaacaactacaacacaagacccagaggtgacttctaggcatatccggggtcagcgtcactgaattgtaaataccgggggaagccctgtgtcctgctgaatgtattgaggtgcaggtgtaagcagtgtaggttagctatgggagtaatttatataatcatctggcgttctgacttctacatcaaccttatgcagagccagaaatcagctgacttgtttttttttgttggtttgtgtgtttgtttgttttagatggagtctcactttgtcacccaggctggagtgcaatggtgcagtcttggttcactgcaacctccgcctcgtgggttcaagcgattctcctgcctcagcctccagagtagttgggattacaggtgcccaccaccacacctggctaatttttgtattttaagtagagatgtggttttgccatgttgaccaggctggtctcgaactcctgaccstcaagtgagcctcctgcctcggcctcccaaagcacggagattacaggtgtgagccaccacacctggccaaatccttgtgcttcgaaaccactagacctgcccacgttgcttagagcacactgaggtcaaagtgagatttaaagctgccagaagctagttattagtttgtttcatggccacaagtagctattaatatctyacaaaagtatcctaagagcctcagtagggaaatggtaagcatgggtggccctgcacacatatctctctgcttggagaagcaactcagagaacattccatgctcacgttaatctcatcttcagagagaacagagcagattataaattgtaacatccaaaagccaaacttccagtattcagcaaagacagggacctctaaatggcacagtcaacacaaaaatcccacactatgtgtgccactgcactacactctatgtgacaggaaaataaaagcaacctcaggccttcaaccagataacgaagcattgaagatgagctgacagcccagaggagaggtagctgatgggaagaggagaaactgggatgttatctagaatcctgacactaggaggtcagtcagggaggggtagggaacctgcaggcatctggcatttagcctcactgtacaatcctcattttatttatttttgagacagggttttcactccatcactcargctggggtgtagtggcgcaatcttggctcactgcaacctccaccccaccctgggttcaagcgattctcctgcctcagcttccagagtagcagggattacaggcgtgcgccaccacgcccggctaattttggtatttttagtagagacaaagttgcacgatgttggccaggctggtctcaaacccctgacctcaagtgatccacctgcctcagcctcccaaagtgctaggattacaggcrtgagccaccgtgcctggcctctcaaactgatttttagaataaccctgagtcacttgtaaactaaatcatatttactaaataataatgtatcttaaaagttggtatttaggggtttgggtcatacaggggtctccatttatcgtacaattaagatttgtgaatctcatcacatgtaagttttaccccaaaagaagcaaaattgtgtttaaaaataaactctaattaatatgcaatgttgaggtgtggaaggggaaatgtactgacatctgtaatttgctctgaaatgtacccaagagataaggcatgatagatasaattagtctttataaataaatatgtgggccgggcatagtggctcatacctataatcccagcactttgggaggccaaggcaggcagatcatgtgaggccaggagttggagaccagcctggacaacatggcaaaaccccatctctactaaaaatacaaaaattagccagacatagtggtgtgctcctataatcccggctacatgaaaggctgaagcaggagaatcgcttgaacccagtggtggaggttgcggggagctgagatcacaccactgcactccagcctgggtgacagagcyagatcctgtctcaaaataagtatctgataaagttcatataatacagtgtcaatgactgaatccaggtggtggccttaaaggtgttcaccgtacaattctgtcaactttgctgtgtacttggaattttacagaatgaaatcttagggaagagtggtattaaaagtatagaaactgaattacttggaatactactcaataggtattcagtaaatacattyagtgaataaataagcacctcattccttcttcaggctagaaactaaggcatcaccatgtgtgcaggtgaccctcatggtgctggtacccagaaaagtcacagtcatcaaggcttctttgccatccttactgtgacctggtagcgttaatgctccatggtcgcccaagacaagataagacagcctcccatggctccccacagagtggagaggggatgcaggcacaggccagagccacgcgtcatactctgcagagctgattccccaacccagcgtccatggccagagtrggggacaccccacgccctctacctgatcaaatttcctctgcttcttttccaggttggacacgagttgccgctggttgtccaaatcaacaaccaggtcgtccagctcctgctgaagcctgttcttggtcttttccagtttatcatamgcggccgccttctcctcgtactgctgggtgaggttctcgatctccttctggaacctcttcttcccctcttccagagcttccacggtgctggcaaagtcctgcagcttcttcttcgagtcggagagctacaaggacagcgtccagggtagggtgagagggggaccatgartggcccctgtccctggccccacagactctgagaagsgaagaccatgtctcctcgttggagaaacccaatagcaggggaagctgrggggtcaagcaccatcgcaccaacactccaccgcgatctgcctgcgggggatctcagcgcagagaagttgagaggacccatgaaggaagcaaggacacggggcaggcacctggatgttgagagtggagatgtggcgctccaggttctgcttggcctccatctcctcgtccagctggtcttgcaggctgttccgctcctcctccagctggcgcagcttcgtagacacgttgagcttctgccgggtttcttcttgaagcarctcctgcaaaagggatgcaaagaggtcccagggacctgccccgaggaaggccaccccccaggtcccctggatgatgtggcaggacactcacctgggtgtcctggagctgggaactgagggacgccaygtccttggccagcttaatggccttcccctcggcctcgttaagcatccctgtgacgctctcaacttcattctaagggtgccaagagactggttagtcaaagcctctagaaggggatcctcgttgaaaggagccctttttactcaaaacacatgggctagtacttgaggtgttcactgattgagaaaataccsgtgaggtatgggactctgataaaaaaaaaaaaaaacacacacacacacamaaaaaacagaatctgtggcttgaagggaactccrtcacctatgagttgggaccctggccctagactctgtggttctaagaacttatttgagccccaatggtattgactgggacctgatcccactaaatggatcctagatccctgccaaggttggtagagacaaagcagcaggtctgagagtccagacgaggtgctctggctggtccactctctaaggctggagaagggagaccaggatggtacttgaacgtcccagggatgctgtcccatcccttccttcctcactcctactctttgaccctgatggccaaagccagagacgcaggccctaaaggtaaaaacgtcctctctgtattctctggcttttactccctagtgtctctgcataagtccctttgaggctgttagcctacccctccatctcttccattgacaaggaggatatgaatgatcttgacactgcttatatgagggcggcaaaagccctgctctcaactgcatgtgagaaaaaaacatctcacttaattcttccctcgccccttggtccctggctgtggacatgttaaacatttgtgaaaactttggccacgtccccatgagtggcaaggcagggtaaatggctatgccaagtgaaagaagaccaaagacaaaaagaccatgtcattcagcagcttaaaacccctcaacagcttcacattgcccagagtaaggatcaacatacatgtaataggttctcaaaagccctacatcatctgggtacaagctccccctccaaccccactctgtactatctccccctacccccaaccccagctgggcactccagctctactggctgtatgtctctctcctaatttttctacttaccacagggcctttgcacacgctgttccctctgcctggtagacttatccatgctccttagggaagcctttcgtggctcctcctcccccaggttaggccccctggttatttacacttgggcatcatgtgccttccctttgctgcatcatttgacattcatttgtgtgattattcatgtctttcccttcccttcccttccccttactcggctggagtcctactggggcagcgacagtgtctcttcttccttgctgttggatctcaggattaagcacagtgcctggcatacagcaggtgctcaataaatacttatcaaattggaaaaggaagggttttttttctttttttttttttttcctgagacagagttttgcccttttagcccaggctggagtacaatggtgcggtctctgcacactgcaacctctgcctcctgggttcaagctattctcctgcctcagcctcccgagtagatgggactacaggtgcccacgaccacgcctggctaatttttgtatttttagtagagacttttcaccatgttggccagactggtctcaaacccctgacctcaggtgatccacccacctctgtctcccaaagtgctgggattacaggcatgagccaccgtgcctggccagaaggtttttttaatatttaattgaacagggagatcatcgcctctcctccaggaacgcaactagaggaaaggacttgccttgcagcaagagagacctcagcgagccgggaagaggctcctccccacagaactgggcaccacccagcactgcccaccacaccaccgcgccacctcctcacctgcagcttgtggactttgtcattgagctccgcccgggcccgctccccatcgctgcacttggactgcagctcctgcacctgcgcctccagcttcttcttcttatgttccacctcctgcttggcctggcccaggacccgcagctccccggccaggtctgygttctctttctccagcgtctgcttattcttgtctaggttcgccttggcctggcgaaggaagcagaggggagggataacagggaggctgtggccgggagaacgtttcaggccctgccctttcctccctcagagaggtccaggaaggcacacaacagggggcacacaatcaccagtaagagatttggggtttttttgttgttattttttttttgagatggagtcttaactctgttacccaggctggagtgccgtggcacaatcttggctcactgcaacctccgcctcccaggttcaaactattctcctgcctcagctgcccaagtagctgggattacaggcgcccgccaccatgcccgactaatttttgtatttttagtagagacgaggtttcaccatgttagccaggctgctctcgaactcctgacctcaagtgatccacccatcttggcctccctaagtgctgggattacaggcgtgagctgccgcacccagctgatattttggattctattttcctaaagctcatgggttgcaatctggaatcccacaagcggtatccaacctgctgacatgtcccctttgaccctttcactacttttaaaaaaatgagttgccgacattttaataaatgtcacataaaaatctggattcccagcttctttttcaaaaaactttaatgtttgaaggcatgccatggcagctcatacttgtcatccccagcactttgggaagcaggcagaaggatcgcttaaggccaggagtacaagaccagcctgggcaatgtagtgagacccccatctctactaaaataaaacattagctgggtgtggggggcacacaccagcaatcccagctactcaggaggcggatggcaggcttgcttgagcccaggaattggaggctgcagtgagctatgatcacaccactgcactccagcctgggcaacaaagtgagaccctgtttcagaaataagtagctttgggaggccaaggcaggtggatcacttgaggtgaggagttcgagaccagcctggccaacatggcgaaactgcatctctactaaaaatggaaaaattagccgggcatggtggcgcacgcctgtagtcccagctactggggtggctaaggcacaagtattgcttgaacctgggaggtggaggttgcagtgaaccaagatcatgccactgcattccagcctgggtaacagagtgagactccatctcaatcaatcaatcaataactaacattctatgtggtgactgtggtggtggtagttacacaatacacatttgttaaaattaatggagcagtaaaatggataaattttactacatatgcctcagtaatcctaaacttaaaaacaaaaacaaaaaaccaacaacaacgaaagatctggaaacagagggtcttgctttccttcaaggcaacaatctgccacatctaagtagcggctggctctgcaggtggggcagtcacctttcaccgcccccgtccttcacaggtgtcgtgtgattgacactgctacttctgtcctagttaagggaaacttattttatggaaccagctcctgtaggcatgtgagttgccctacaggaaaaaaaaagtgtgttggggccaggcgcggtggctcaggcctagaatcccagcactttgggaggcctatgcaggcaggtcacttgaggtcaggagtttgagaccagcctggccaacatggtgaaaccccgtctctactaaaaatataaaaattagccgggcatggtggcagtcacctgtaatcccagctgctgaggaggctgaagcaggagaattgcctgaacccaggaggcgggggttgcagtgagccgagatcccgccagtgcactccagcctgggcgacagagtgagactttgtctcaaaaaaaaaagcgtgttgggcaaaagtaggacgcggtgaggggcttctttccaggttgtagagaaggggaaagagaagcgcaagtatcccgagaggacgagacccaccactcagtcttcccatagtccctgggaggtgctggacgttgaccggtcagccctggatgcccgtcctccctccaagacatgactaagagctgccagacctcagatggggacagggagtctcttggtggtaacaaagcagtgaagcggggaccctaggggacatgggctcccagaaaccttagcccagcctaagaccccagaactggggccaaaccgcacgagggcctggggagcccaggtaggagctgatgttaaacgtttcccccacaagcagatggaaccaggtctctacatcagaattcaagttgttagaggcaaaggcctctgtttccctgcacctgagatgggcagaggtttgcacctctacctgctttgtgcgggtcagtaatggacatgccgtctgctggtggtcttaataactgcgtcttcccaaagaggcctggctgggaatgggcttggcttctagctcctgttcacgtctaatgaaccccaagcatggggagggtcagtgattctgtctggggcctcactcttccaaccataattttttttttttttttttgaaactgagtctcactctgttgcccaggctggggtgcagtggcacaatcttggctcactgcaacctttacctcctgggttcaagtgattttcatgtctcagcctcccaagtagctgggattacaggcgaccgccaccacgtccagctaatttttgtatttttagtagagacggggttttgccatgttggccagactggtctcaaactcctgacctcaggtgatctgcctgcctcgggctcccaaagtgctgggattacaggcgtgagccactgcacccagcctaattttatgtatttttagtagagatggggtttcactatgttggtcaggctagtcttgaactcctgacttggtgatccgcctatctcagcctcccaaagtgctgggattataagcatgagccaccgcgcccggcctttgggggcagtttctaatggtttagcactatccctttggtgctgccctcatgagatctggttgtttaaaagtgtctggcagctccccattctctctcttctgcctgctctggtcatgtaaaacatgcctgcctccccgttgccttccaccatgatggtaagtttcctgaggcctccccagaagcagaagctgctatgctttctgtacagcctgcagaaccgtgagccaattaaacctctcttctttagaaattacccaatctcagggtggtgcagtggctcacacctgtcatctcagcactttgggaggccaaggcaggtggatcacctgaggtcaggagttcgagatcagcctggccaacatggcaaaaccccatctctactaaaaaaaaaaaaaaaaaaaaaaattagccgggcatggtggtgtgtgcctgtagtcccagctacttgggaggctgaggcaggagaatcatttgaacccaggaggtggaggttgcagtgagccaagatcacgccactgaactccagcctgagtgacagagtaagactccactgctcaaaaaataaacaaataatccaatcttgggtatttctgtagagcagtgcaacaacggaccaatacactagtgatagaaccaaatgcaaattccccaaaatttttaggcaatgctgcacccacttaatctagcagaaccaaaagcttccactgaaggggatgtggaggagctgcaacgctgagggtaatgtaactcaggctttcaggaaaacaatctggccgaaggtcgcaagctaaaaaacttaccctggggaatgaagcacaggcactaccccaaaggagagaagagcacccaagattcagcattcggtactgctatttaccagctcccactcccatacaccgcaaagagttccaacaacgggagagtgatttgacctagtcattctcaaattatgccggagagagctgttctgccattgaaatcaaataatgacaagtttcctccagtcttttttttttttacaaaagaaaaatcgctatgttgcccaggcgatctgaaagtcctgggctcaagcaatcctccctccttggcctcccaaagtgttaggattacgggaggcatgagccgccatgcctggccttcctccagtctgcagagaaattaaagtggatagaatgatcccagttttaagtttcatttaaatctccccgaaagtgttgttacacctttgcttatccctgaagggcagtatattgataggccccacccatcctataggccttcagtcctgtagaggccagaaagtggggtctaggaccagactgtttgggtgcaaatcatggctctgtcacttaccagcagtgtgaccttgggtaagtctcttcacctctaggcacctaggacctcagtttctttgcttgtaaaatgagtttaatagtacacgtctcacagggtggttgtgaagattaattgacatactgtatgagaagcatttctattcattcttttttttttttctttttttgagatggcggctcactctgtcgcccagactggagtgcagtagcacgatctgagctcactgcaacctcttcctcctgggtccaagtgattgtcctgcctcagcctcccgagtagctaagattacaggcacatgccaccacacccagctaattctttatatttttggtagagatggggtttcaccatgttggccaggctggtctcgaactcctgagctcaagtgatttgcccgccttgcctcccaaattgctgggattacagacatggtgagccaccgtgcccagcctatttttattgtttgattaaggtctcactgtgtcgtccaggctagagtgcagtggcatgacagggctcactgcagcctcaacctcccaggctcaaacgatcctcccacctcagcctcccaaatagctgggaccacaggaatgcactaccaggcctggccaatattttattttattttatttttttgagatggaatcctgctctgttgctcaggctggagtgcaatggcatgatctctgctcactgcaacctctgcctcctgggttcaagtgattctcctgcctcagcctcccgagtagctgggattacaggcatgcaccaccgcgcccggctaattttttgtatttgtagtagagatagggtttcgccatgttggccaggctggtctcgaactcctgacctcaggtgatccacccagtttggcctcccaaagtgctgggattacaggcttgagccaccacgcctggcctacttttttaaaattttagtagaaacaaggtctcactatgttgcccaggctggtctccaactcctgagctcaagcgatcctcccgcctcagc

SEQ ID NO: 8814 - DNA, 46738 bp, Homo sapiens
cagtgttcacttttgtggcccaggaagtctgtgtggacccatgcccagatttcagtgggccaaagtggcagtgagaattaggaaatcaaacagaacgcagaacaccaggaaactgtcagaagtttgaagatgggagagaaaaggaggtgatttggaactagagtaaaaattggctatttagtaggataggagacacttgagcttctttatggactgagtaagcaatggatgggtgtctggccccaaggggataagagggatctagggtctaggtaaagggagcttcctgtctcctctcctcctttctgcctctctttaaggcctattctgatcccctcccctaaactttttttaatctttatagcttgttgtcaactgaccctccgcaggaaatttaaggaatagcccttcccaaggaagtattcacttagaaaacaggagatggcctaggatcccatctgtttctctttctcctcttttgtcaggaagctaaactcgccctattttgcaccccatgcttctttgcctcctccatagaaacctagttcatgctttcctcacaggtaggaagagttgtcacccaccttgaaaacttcttcaggattggttaactcatcagctcctggtgaagctgggccagtgggaaggaagagcaaagaggccggggagttgggacctggacttcatcctccatcactggggccaagtcccagctgggcctatgcaaggcctcagtttcttcctttgttatatgagggagttgactgagatcactatggtcccttcttgtagtgtgactgcttggtgttatacacatgcagaggtgaagctcaacttcagggtctccctcacatgggcaagtccaggccctgtggaacggtaatcaatttgacctgagttcaaagagctcaagtgggataaggggtgaaataatgatcagcctcctgctgaccccttagggttttttccccctcctccagccattcactatcgtacattctgcctcctgtaaatcatgagtagctagctagaaggtttgttagaaagagctctgaaccaaaagtgagaaggcagccttagaatcccgccattttctagccatgatattgatatactctgagtctgttttctcatttgtagaatgggattagtaatacctaccacatagtgatatgaggtattctataagactgtatatgtaaagtgccttgcacagagcctgatatgtaaaaggtccctatttaaatatttcttgggcctgagtgcttatgatcagaggacataatacctgcaatttctatggttctgtggaactaatattggcgcatatcaacctgaaaaaaagaactttttattaatcttccaggaactagaacagaatttttcctttagtaccttcctggtttctttgtccagtactctctccccccatctgaatcaggaactacatttttacattcctttcaaatgatacaattgcaatgcaacaattcccaaggtaaaagaataactgtctgtcttgctggctctattttttcttttcttcttccttttttttttttttttttcttgacaacagagagcttctttttccccccagaaaagaggcaacatcaccctgtcaatgttaaattctggcagaaatgaagccactgaaatggaaagagaaaaaatattttggcaacagccaggaatgagaaattgcatagcatttactgggttatatatattctgtggatacaggatactctctattattggcaatgattgtctctgtggtcaatgcttatttctaaaataattctcttttcagtgcacatggcagattgattgcattgatggcctcagtttgtttgtgttaatctctccctttgctctatcactttgtagttcccctccataaagaggcagagtatatattaacccatctcttgcctttggactttcatgtggcttgctttggcccatgggatggtagtggtcatgatgtaagtagaagctttaaaaaatgctgttgtgtttccactagttcttttggacccctgacattaccatgaaaatgtgccagtccagcctgccagagagatgtgagagacatgtggaagagaactgagtcatcccagccaaggccatcctagaccatccagctcctgtcagcaggacacagccccattaacagagccacccagctgacccataggcttgtcaacagaaataaatgtttgctgttgcaagccaccaaagttttctgattgttacacagcagtaactactccattcaccacatttgcttaaagtgttggtgcctgggggtgacccccaacttctgcaactaaaatggtgaataaattcctgtaacttgagcctcactgattttatagttagtagcctggagagtttgttcgaaatctccatcctaggcagactgccctttaattgttcccaaaatacaatctgcacatccctgactctgcctctgcctctgtacattgtatttgtccacactgaaatgtccttctccttcctgcccatttgcatcatactagatgtccaaggaccaattttaaaaccaggctcttctgaatgacttactgcgactgttccctgccttttcagcctattaattcaggttatttcttgcctgagctatagatcggataccagacccatgtttgctgtatatggctgctgttttttgttttttttttttatctcagctgtttattaaactagatcccaagttcctggaggacagggccctcttacacctcttttatcccccaagccttgcatagtatcttgaaaagggaagtacagggcctttcacttaagacttcaatatttgtagtttgaccatcactggagggctaataggtatcattgctaatgaataaaaccagaagaatggatgagtgaatggagggatggatggatgtatggatggatagatagatagataaagttagatgcctccagacctgaatttgtagaatgtaccccattctactataattctcactaggaaaataaattttactttaaaatgccacctttcccctgaagattttactgacctcccattcattctctccagattagacatgccctcttccttctctgatatccctatgtgacagtcaagttcttacctgctcacctccaccatgccacatggcacaagcagcagctccttcagatcaaaggctgcagcttaattatgtccttaatggatgtccagcacatggtagggtgcttactgcacagggagtattccgtaactatttgattattttatctatcccacctctgtctttatttatttatttatttattttgagatggagtctcgccctgtcgcccaggctggagtgcagtggcgtgatcttggctcactgcaagctccgcctcctggcttcatgccattctcttgcctcagcctccccagtagctgggactacaggcgcccaccaccacacccagctaattttttgtatttttagtagagacggggcttcaccatgttagccaggatggtctcgatctcctgacctcgtgatccgcccgcttctgccacctaaagtgctgggattacaggcatgagccactgcgcccggcctctgtctttattttaaatgccctacttcaggcccttattattgctcatagagacaactacaaaaaccttgtaactgaccttcttgcttctagccttgtctcccttcttcacctttcaacctgttagcaatgcacacatacagaattcaacttaaaaggaaaaacggaaaatccaaccaggctatactaccactaaaaatcttcatagcttccctcttctttgaggtattaataaaagccaagctcttaggcttggcacacraagcccactaagatctgcccatcctacctgtatagatccttctttcacaacaacctcaaacttcattccaacaagatagtacagcctgtgtgttactattcatgccacacggtttttccccaactgtaccttggccccctgcctctctagatgactcattgactcacctggcccagcccaatccatcttgaccttccctcctgcctaccaattttccccaccccctataggtgccccactgattgttgacacattgcattgtgattatctgatttaagtggaagcttcctgagaactctagcactagcgtagtattagtctaggttcagggccaactgttgcatttagatactcctctgccatccttgatacctgggttcacatcggtgtaactgcccattagcgtaactgcccaacaggtttctccttgcctgctgcccagatagaacagacttatcaagacaggagaattgcaatagagaaagagtttaattcacacagaaccagctaaatgggaaaccagagttttattactcaaatcagtctccccggaaattcagagactggagttagtaaggataatttggcaggccagggagtggggagtgctgattggtcaggtaggagatgaaatcacaggggatcaaagggggttcttgcagtcttccgttcctaagtgggatcaaagaactggtggaaccagatcaccagcctggatggtgtcagctggtgcatcaggatgcagggtctgaaaaataccttgagcaccaatttaggttttacaatagtgatgttatccctaggaacagttggggaggttggaattgtgtggcctctggctgcatgactcctaaaccataatttctaatgttgtggctaatttgttagtcttactagggaagtctgctccccaggcaagaagggggtttgtttccagaaagggctgttatcctctttgtttcaaaattaaactaagctaaattcctcccaaagttagtttggcctacaaccaggaattaacaagggcagcttggaagttagaagcaagatggagatggtgaggtcagatccctttcactgtcataactttctcactgttacaatttttgcaaaggcagtttcacagggcagatgaagatttacttaaatgtctcatgatggtgatgatggtagctaatattcattgagcagttactatgtaccagatattgttctaagtgctttaaataaattagcttgaaactatcattctcagcaaactatctcaagaacaaaaaaccaaacactgcatgttctcactcataggtgggaattgaacagtgagaacacttggacacaggaaggggaacatcacacaccggggcctgtcatagggtcgggggaagggggagggaaagcattaggagatatacctaatgtaaatgacgagttaatgggtgcagcacaccaacatggcacatgtatacatatgtaacaaatttgcacgttgtgcacatgtaccctagaacttaaagtataataataataaaaaaaagtaaaatacaaaaaaaaagaaataaaaaaataattaaaaaattagctcatttggcattcacagtaatcttacagggtacctactattagtatcctcattttagcaatgagggttaggaaaagttaattaagttttctaagattgcacagttactaaaactagaatctgcatgcaaacccaggcagcctgactctagagcctgtaaccttcagcaccacctcatgtcgccccaagttcatgtttttcaggggccttctcccatttctcagtcatttcctctctcaagagaggaggagaaggaagggccaagaagacaacattgctggtgccttttttatttattcagtttacctaaattctctcatcattaccaaatgacacatactgtgagccaggttgagacccatcttttcttagttttatcgatatctgtttacttaaccacaaagataacttttttactcccaaatttgagtgattagtaaagagctacataatgtaaccagttttgcttttcacaagacatctctatttctcagtgggctgaamaccacacttttgcttcctctttactttgcagtgagagcacagcatttgtcactcaacctctgaatgttagtgacactattgggacgaaaaaggactgtgctggcccaaatggcaggcatctcatatgtggcatctttctttctccttctgagtaagtttcataatcctttatgtttctcttgtcacaggagttcatcaactcagggtgctgagtgatggaacaggacaatttggtctctacaggaacaactatgccatatatttctgatgttagcaataatttttgacttactaatgacagttcttggcttacctagacatccttgagttccagggagtcacaatgcttggttgagtcccatgcacaagattccattggttttaacatttgtgtgtgttgccagatctgtcagttttgcttggccctggctttactcatcttcctgggccgatcatcccaagagacagtaaaaaagctttgtgtcccaaactgagaggagaccttaaggtttgcctgatattaaggcttgatgggataactatgccttgcagatatgactggatggaaagaaaggttatgaaagtacttagtagttttagactatgctaaaagaaggttctagatttcacctgcgagtggaagtggaaattgactactgagagactgagaaatgaacaggaagattcacttggctctactgagggccatgcagaggggcttgcctgatctaggggcatttatctatgtttgaataggatggaagaagagaaaatttggaggtagaagggagagtcagatgagttgagcaggtaatggaatagtttcaaaccagatagcaggtactttttatgctacagttttcattaacatctggtaaagagaatagactccatctcagaataatgtttaaaatgcataaaataaaatgcatagaattacagaggaaatcagtcacattgaaatacaggtatcaaaatattttaaataaawtataatgcagtaatttatttgcttcttatttatgcattacataacaaaatctacaggtaggtcttttaaccaccaaacttcaaagtaatgatgagtataaataacatttcaatatatcttaagtagttgtaatgtgatatgaagatatctgtggttgtctacatacataactgaagaaaatactaaatttccattagaggcaaaaatgaaaataaagatgtaagattatttttcaccctagtttatggaccctttaatcctacatgtggacccagttaagaactcttgctttatagctgggcatggtggcacatacctgtggccctagctacttgggaggctgaggtgggagaatcgcttgaacctgggaggtggaggttgcagtgagccaagattgagccactgcactccagcctgggtgacagagtgagattccatctaaaaaaacaaacaaacaaacaaaactcttgctttagagagactggatggagccagtgcagggacccgaatggctgggatgattggggaactaaaccaagctgcatttggtgtgaccaggactatggctgaagaattaaaagaaaagaatacagcattcagcacaaagagsttgcttaataaacattgattgagttgaattgtgctcatgtctctaggtacatatgatagtgtgaggttaagagtcagacctagggcctgcaggggaagttactgggaccacttgctgggtgacggatgcctgccagactggcttggcgggtgttgatggataggtgcactggtgggatcctttgggggctggtgtgtttttgttgtttggttaagttgtctgagtgtgattctcaagtgtatgtgctttgtgtatttgaattctatgtttgctatgtatataggaggaaactgggtttacattgtgcaataattcatagaattgcaaattctgtctctttttttggtaagcaggctagaagccctgggggaaggaaagtagtaatcaaggctcaaaaaggggaagctggaagcttttccttaacccatttaaacaattacctaaactgggttatacatttacttcttctaaattctgactcatctgaagcactaattttgtgtagaagcacagtttttatgtgaagaatacataaatcaggaagttactggaaaaagctttagaagtctgctgtttgtccttacaaatatagaggggaattgaaataaattatttaaataacgatctattgatcaattacattggttagcaaatttacactttgtcccaattttttttyagtaaatataaggactgaacaatcctgatagaaaatggtgccatatgagattaatgtcatgggtaaatgagttctcggatttagcagttagctttgtctgcttgatctatttcccccacccaaactagctgccctacaaataatggccattaatatggcagggtttgggggaagggctattgtctgtcttactgagtttgcattcatgaaaaataaaaaagattccacttagtatggatggaagctatctcagcctccaagcatatagggtttttgaatgtgaaaagagaaagaagctgcttgttatgttggctattcctgaggtaggttttgtataaggtagcattatttgaaactgctgtttttttggtataaaaagtgctcaagtatggaccattttatacagttcaacctaatcgttttcattcaaataatactgcagtggtaaatttgacaattccagtgatatttttaaagaaagtcaataccatcgaggaatttttggtgttttgaaagcatgattctaatgttagtatgtcagtgccaagctttgtactcatcagccaacaagaatatgagctactattcaaaagtagctaaccctctacccattaaaagagagagcaagagggcagtcctcacaggtgtttttcggagggtggatgatatgtacttgaaaaaacccagagagaatatatttatagtaagatgcttaagcttatggccccagtgcatagccatttgagttgatctctgccagtcaygccttctacstgaaaaatacctttgaaatctccacactatttctttcacttttctcagaaagtagtatgtcttagactgtttggcgtgttgtagcaaaagtaccataaactggggcgggtgggggaggggggcttataaacaacagaaatttagttttggaggctgggaagtctaagatcaaggcactggcagtttggtgtcagtgagggcctgttcctcatagcaccttctaactgtgtcctcacgtggcagaaggggctagcgagcttcctggactcttttacaagggcattaatcccattcatgagagcacagccctcatgacctaattgcttcctaaatgccccatctcctaataccatcaccttggaaattaggtttctgcgtgtgagttttaggaagacacagacgttragactataacacagcaccctccctgtcatccctctactaggacattacttcattcatcctccttgctggcttcacccattctccatcccwccccttcctaccgctcctcacctagctactctttctagctgccatcctaatcttcatttttccttctccatgaaactcctggaagtagrttccacttcctgcagtcacttcttaccctgaaaactgctgcttccactctattgaaatcccttttacaaagatcttcatggacatcctcctcatcgagctaacaggagtctcctctgccttcagagtccccaacctcttggcagcctttggcagtgctgacaagccctttcctcttagaatgttcttcccttgatttccagccgctgtgtcctagttgccctccatctaactcttccctctgtaagttttgttccttatcccatcccctaaagagagaaattccctagtaatctctccttagtcctcttccttctgttccccaatacttcccaacacttgtatgtaactgacstaatctacatctaacagttcagaactctccctagttacaaacagacatttacaggagccaacaagaaacaatggggacagccatggatttggcatttgcagatctattaatatgttcaagtctggctcaaatcctaggagtttttacataactaaatatgggaatatcacagggtttttgaaaggattcgattacaaatattttcaaagggttaaagtctatttaaccctttgaaaatatgtataatttatatgtaaatataaatatctatatttaaatatttcaaaatgtttgctggatatccttcctgtctattccatggtcttcaaatttagtatttctaaaattaaatgcattatattttcactcacccttatacacacaacagtaactcttcctaatatctgtatttctagtcagagtatcaatattctcccaggcagccttatcaaacctatgatctttgatttcttcctacctctcatctcgccatttaaccctgctactcccaagcatccaacgcactgaaaactacagattttgtctccacagtagctcagttatagtacctttacttttatccctattgcttttgtcacctctgtcctgagctcctacaattacctgattgtctatttctaacttccatcattctgcacacaaactgtgaggttcattttcctaaaacctcctaaacactttcagtggattccccattgccaatgaatcaagtccaaacttttaaatgtgatagtcaagtcctttctgctctggacccaaaaattgctgtccagttttacctctttctattaatctttatgcagccctcccccatccagttgattactctttaattttgagtaagtcttttgattcctactcagagtcttgccatgaaatctccttcacctaaaatgctctgtctccccacttaccttgtcataatcttcccaattctccaaaatccatttctaatgccatctcttatgccatctccataaacctatttccctcccctcaaaatgtagtccctcttcaaaatttttgaagcacttttattatatgttttccatagagaggtgactactatccacttgattggattatgaaatccagaagtcagaatctagcctaaattcatcttcatatcttagtccctcaagcatgagaaatactataagtagttgaataaatatttattgaattggcaaataaagcagtagaaaaagaagtgcgtgttttcacaataaaaattttcaaacgtggtacccatcttgctgaaaagtgatgggaaacgttcgagaagtgttgcctagccaccaaaaataacattgtttgtagaaacatgccttgatatatgtgggttagtggtacctcaaaagccacattaagaaaatatttttattgtgaaatacaacataagaaaatttttattatttgtttaaaataattttaaaataaatttaaaatttgttaaacaaattttcagtttaacaaataagcacaaagtaaaatctgtataatgtctacccaggtcaagaaatagaatatcgccaagaccctagaagcacccacccagcccgcagtgtgccccatcagatcacaaacaccatgcaatcactttcctgactttcatgataaccacttcctagtttgcttttttttttttctttttgagatggagttgcccgggctggagtacagtgacgcaatctcggctcactgcaacctctacctcctgagttcaagcgattttcttgcctcagcctctggaatagctaggattacaggcaccttgccaccatgcctggctaattttgtatttttagtagagacagggtttcaccatgttggccaggctggtcttaaactcctgscctcaagtgatctgcccaccttggcctcccaaagwgctaggattacaggcatgagccacctcgcctggtcatttcctgcctttttgctaatgatttcagccctttatgtgtgcatcactaaataatayagtgtggtttcacctgtttttaaactttataaacagtacgatcattctgtatatagtcacaaggattcagaagtgtttttgtatcttgctttgaacatagtcattcatgttattgcaaatagttgtaattgttgatttttgtttctatataacattccactttatgactgtaccacagtttatccagcctactgttgatggacatatgggttgtctcttgtttgaagctttaatgagcagtgtagctgtgcatattctttcacacatagcttggtgcacacatttctctaagacgrcattactgaaaagtgtcttaaactgccactgtagtataacttgttggtaagtaataatttacatttttctaaggtggtctaacttgtattcctagattcttattacaaaaaaagcatgatataaatatgtcacattaatttggacttatgaataaattagtgtattctaaattattatagaggctgagcgcagtggctcacacctgtaattccagcactttgggaggctgaggcaagcagatcacttgaggtcaggagttcgagaccagcctggccaacatggtgaaaccccgtctctactaaaaatataaaacttatccaggcgtggtggcccatgcctgtaatcctagctactcaggaggctgaggcaagagaatcacttgaacctgggaggcagaggttgcagtgagccaagattgcaccacaacactccagcctgggtgacagagcaagaccgtgtcaaaaaaaaaaaaattattactagaaatgtgtgtggttggctgactagttggttgggcattggttggtttcccrgttttagactgaacatacatatatgaaatatatgcacttgactgcatcaggtgaccacttaccttttctgtgcttttgcccttttttgtagttccctcctatcccttagaattattttcatttcatcccagattcctatactcagccttatcatgttctctgtaatgtcctttttcctttccctcactttttttttccactctggtctccttactctttgtccctgtggagtcacaaaatgcagcagaggctctgcttcttactcatcttcgtatgaactctgttcggttaactccataaggccagcaatctctccctgtctggcccttctggtgtcttccaaccctgtcttcccttttacagtaccctgggcccctagtggaagaactgaccactcttgtggcatgtctttgttctttctgcaacacaaaatgaactagcctttaatatcaatcatagtaagtaaagatatgctttttgatttctgaaaaatgcttgatttaaaaaatttgtcaaatgaaatattaccatttaatcatgctttttcctttagacctaatacttcagatttgttctaatagaaaacattccctagtggtcccaatggaaaacttttggtaagaaaaaagctaaaataaattctaatcccagaacctgctggattttctagccatctattaggaggcttttcagtaaagctatagtggctctttaagaaatgacaaaacaaaaccaaaaaaacctccacagaatagaaaggaagtgctgctgcctcgtcagatgctaatgttggctagtcttgcaacagacctggctaggagctacaratagttccaaccaaccagctagaaaaatcatggcaccaagggcagagccctagactttgcgtctccagcaactacttctctgggaactgcccgatggcaggcaccctggaatttgagacttgaggaagtatatgccaaattttctcagaaaataatgtaaagttaccatacatttatttgctttaaaataagtacacttcgataagcagatgttttatagaagtggtcgtgttacattgatgaagctaaatttttttaagagactgaagattactatggaagttaaagttataaaagaacaattaactcatcaagcaattccactgctgctcagcctgaagaagatgttgaacatttgagtcaattatagctaataacttgcgatctcatttaccagaattgtaatacagggaaatacataacgtggtacactgggaactggaacactaatctctttttattcccctttctttctcctacttacaagctaagctcagcattggccagagagaagtaacagttcagaaaggaccactgtttagagctgaaggttacccagtcagcattggctgcaaygtaactggccaccagggaccttctgagcagcatttccagtggtctgtttacctgccgacaaacccgacccaggaagtccagatcattagcaccaaggatgctgccttctcttacgcagtatatacgcagcgggtgcgaagcggagacgtctacgtggagagggtccagggcaactcagtcttgttgcacatctcaaaactccagatgaaggatgctggcgagtatgagtgtcacacaccaaacactgatgagaaatactatggaagttacagtgcaaagactaatctaattggtaagttgcttgtccacttctgctagccagcccctgagaagccagagtctccaccatgacaatatcttgcaatatgacatggctttatattgttccattttctttgggaaaagagcccatgtacccctgtggatattttggagatatgtcacaagtgggtatctcatattctctaaaattatctgtttctttttctcaattatctttgccataaatatttagatggtgtgtggttttcccaaggccttgtccgcagctctccataggttgctagtagcaacagcattcaacaaagctgtgagagttctccctgtgttgtctctgcttgcaggcagaacagtaatttgacaagaaagctggtaccataggtgataagtcattaacttagaaatgataattctcaaactaccattctctagcatatttacacattgggaaagggtgatagtccttgcaattgtcactttgtccctttgtctggaatatctatcacccccttttcagcttaacaaactcctacatatacttcaggacccagtttagatattacctcttctgtggaactcatcttgactgcttgggcagaattcccacttttgtttcctttagattgttcataccactgctctcagcatgtatccagttacatggtaattggctatttgtatgcctctttcccaccacatcctcagcttctactcagtggctagcaccgagtagacgctcagtcacattcattgattaaatctaagtgttgctttcatataagcttaggctgtgtgatttcattttaggaaaacaagaatggtagggtagtaagatggttaccaaaactttagtaaagattgcatttgggctctaaatgatacattttaacagccattattacattattagattattacacagccttatagaggagcaggttaaggcccagggaggtgaagtgacatgcccaagtccacgtagtagggatggatttaggatcagaatctaaggtttctctgtcccagtgctttctccctttaaatacatgctttgtgtctgagtagctaaattggttatagcctatgttaataaagcaaagtgagggtcaacacattgatgaggcatttactttgcccagttccgtagactgtacctagatgccaatgttcccaatggcaatagagaaagcatatggataggaaagcatatggcaagtggaaaaccaactcaaagtctgtgtgctttacatagggtagctcagggcgccatctaaggaggcccactggacaagcactgggccagtcacattattatcattcctttgtttccagttattccagataccctctctgccaccatgagttctcagactctcrgtaaggaggaaggtgagccattagccctcacctgtgaggcatccaaagccacagcccaacatactcacctctctgtcacctggtacctaacacagratggaggaggaagccaagccactgagattatttctctctccaaagattttatattggtccctgggcccttgtatacagagcrgtttgcagccagtgacgtacagctcarcaaactgggacccactacattcaggctgtccatagagaggctccagtcctcagatcagggtcagctgttctgtgaggcaacggaatggattcaggatccagatgaaacttggatgttcatcaccaaaaagcagaccgatcaaaccactctgaggatccagccagcaggtaattatcttcctacgaaattcattaatacactagtattaggtagtgggtatttatgaggtatgttttaatttttgttctaatcttttgttggctctaaaaaattggctagaaagtwtgatttaattttgtatttttgtcatctgagaagcataactaagagggagcacattcagttctggctctgcccacggattctttatgggataaggtctactgagtggctagatcgattccacaagccagtcatggaagtagttttgttaccatttttgccagtctctgttcacacattatctacattatctaatttagtcgtaaccaccaccctatgaggcaagtagttgagtctccattttaaaaatgaggactctgaacttcagacatgctagatgcgctgcctaagcccacccagctggtgagmgtggggctggcattcaaagggaggcctgtctctctccaaagcccactcagcacagacagctgggcctcaaagtagctccagtttccaacatgaagccttgtcttcgtcagtgctggggtttccttccacctgccccctttcccaacttggaatgcagtgactttgcttttttattatttttttaatttttaaatttttttaaggacaggatcttgctatgttccccaggctggccttgaactccggggctcaagcaatcctcctgccttggcctcccaaagggctgggatttcaggcgtgagccaccgcacccagcctgctgttacttttcataatcttttggcatttttgtcaaagcaagtataaaggccttgtctgtgattcctggtctctataggcttttgtccaacaggaagtggttgctaaaccatatactgtatatgcattgctaaaagcaatgatccaatagtggatcattaaagttttttctttattaaaaacagtattattgtgttccactaaaaattgtcctgttggcctcaagtatccaagttatactcatgagtcctatggagcgatatcacatgtgctttttaacttcagaaaattctgctggatattcttagccaaaaaagagagtaagaaatcacaatttacagcaatttagtgtaaaatatttaatatatatatttaattcagtatacaatattttattttttaatttaaaaagcatacattactatatgtgtcatacatttgtgcatacatcttgcttactaagagtgcattcagaaaaccatgtgtactgtcctttctgggtgatttaaggaagagtcatgagcgttttttactctaaggattttgttttttttgggtttacctaccrctatagaattgaactcccacataaaatgtgatccctgtgacatccttacagagggtgtcatctctctctggtactgaaaggacagaggctgtgggmtctctaaatacctgccttgcttttgtttcccagtgaaagattttcaagtcaacattacagctgacagcttgtttgctgaagggaaacccttagaactggtttgcctggttgtaagcagtggccgtgacccacagcttcaaggcatttggttcttcaatgggactgaaattgctcacattgatgctggtggagtcctgggcctgaagaatgactacaaagagagagcaagtcaaggagagctccaggtttcaaagttaggccccaaggctttctctcycaagatcttctctctgggcccagaggatgaaggcgcctacagatgtgtggtagcagaggtcatgaaaacacgcacaggttcctggcaggtgcttcagagaaagcagtcaccagacagccacgtgcacctgaggaagccagcaggtacgtaaagtcaaggccaggcatgcattgggctgctttcagatgcccccttgtcagtggaagaccccttcgtggatacaatggggatcttcatgaagagcaggtttcaatcagatcacattggaggtggagtggagtggagtaaaggaaggcacccaaactagctgaagacccgagtcctattcctgagtcattaagtagtctgtgaccatgaacacaccactttacgtctctaagtctcagctccttcatctgtaaaatgatggcacacaactagatggtctttaagttccttcttgctatcttagagtctatttattttttgttctaatttttatgtattagatatttcttaaagcagagaacatgtgtattaatgaagccctctgcctttgtgtgtgtgtgtgtgtgtgtgtgtgtgtgtgtgtgtgtgtgtgatatgaataggttaagagtaaaaagctacactttgtcctccttcctgaggaatgaacacccgtgttatcctaccttgagaccctgccggcatttttcagttgccttctgttagtctcctactatgttgacctggtgtgggaaatagtacttagtcataattctgactcacagtaagaaatgaagaggtaattgatagtgggcagactccatcctctgcattttgctgtgatgtggtgagacgccggtccaaatggttctgaatgtctgcatgcacggaactgagraagccactcagctcacctttactttatgaaggttgggtgaccttaaacatgtttgaataatcagtgccttttgtgaagaaaaacagacatatctrcaactaatataaggattcactaggctgggtttaaattcaaagtccagaaagattaattgcccaaaaaaaattttttttaatgttttaaatttttaaaaactgagctaaaaataaaggtgtccttgttgcactggctcattggagacatctccaaagatagataaattttcctttcatgttctccaatatgccatttactaggaatgaagatgcacygatttggccttgagtggcaggccaggaagtgtgttggtgttcgttttcacactaaacatttggtctgactttctagaattaaggaaaaacaatataggtgagttcacatatttatgcagagataagtttctgctttaygcatctcagccttctctggaacatatctgcaggcttttgtaaacctrgtatgtgggaatttcacctgaaggggaacttcagggtacacagctgataatcctatcaatagggtcatcttctaaaactaaaaatagttctttgtataggctggagtctacactgggcttactaygtagacacagaaaaagttattagcaaatttattaaggatcctgtttagcattctgttttgaaagtcaaacgttacttgaagtattagcaacattttatcatttatgaatattttaatcactcattaccattgtgaatgtgtaacttgcacacatttcataagtttattacttcttaccaaaaggcagtaatggccacaatgaactaaggaaacatcatttaaaaaaaaaatcattagtttaaactaatcatcatggttatgttaaagtggtgagattatgagtaataatttcccctccaattttgaaacttcagttatgagtctatttttaacttgaaaaaaactaaatttgaaagcagatttgctctttttaaaaacatatttatggacattaaccctcattctctctttgttacttatgtatatgtatgcataaaacagtcaaagattgaactccttcctccgcagggaagaacaatttgcaaattcatttagatcctatttagatttctaatgccagttctattttattttcctcttttgctttgaattacctctgcttttgccagagcctatcattaaacactaatgctagcagctaacctttactaagtactttccctagccatccaggctaagctctttgttcagtcttcatgtgccatttgttcagtcttctcaacaatgcagcaaggtgagcactattattatcttcatttttacagaaaagaaaactgtggtcaaatatgttgcccagggcaattctgactccaggagccgtggccttaaattagtgttgggctgcctagaatgtacaatctcctgctgtatctctacattgctcacaaagcaaccaggaaagaccttgcagaattcatgtttgttgaataaatgcgtttgttgaatgatgacttgaatttcccatctgggagccagatttacatttatggttttacactgtagtttagacataagaagcctctctgtttacaacaacgtgtgttgtcgtacaccttgttgtacacgttgttgtacaacaacgtgtgttgtaaacagacacacatttatatatatatatatttatttatatatatatataaaatgtatatgtatatatacacgtattttcccgccaagtaattgtttttcatggtaatattgtgaacagagatataattaacaatgatgtttcttcctcattcaaaacacttactaaaccaatcagattgattagggaaagataagaaagaggaagattgtcttgaactctgaaggtccgaattctaaaaaactaaaaatttaaataaacacagctttattagtttcaggctcttatatctaccctaattaatatactaaaacattaccagatgttttgccaactagatattcttaaggaagagttgatttaacaaacaaataagaaatatgtgcaagtgataaattgtttaagtaagctgggtgcagtggctcatgcctgtaatcccagccctttgggaggctgagacaggaggatcgcttgaggccagaagttcaacaccagcctaggtaacaaagagagaccgtatctctacagaaaatttaaaaattagccagcatgttggcacgtgcctgtagtcccagctactgaggcacgaggcaggagaattgcttgagccaaggagtttgaggttgcagtgagttaagatcacagtgctgtgttctagcctgcacaacagagcaagacccagtctttagaaataaataaattgtttaagggtgaatacatcctccgatattctttctgctatcttgtttccactatttaaggtttggcaaatcttttgcctgagggtggtgcaagaggaaacagcccaatttgacttgtcacaaactagtcaagtcctaattaatgaaatttcactgtattttagaacayttcttatttacctaaaacagttttgttcttctataatctgtaactcacagcaagaagtgtggtcrtgtctaccaagaacaagcagcaagttgtgtgggaaggagagacactcgcctttctctgtaaggctggtggagctgaaagtcccctgtctgtgagctggtggcacatcccacgggaccagacacagcccgagtttgtggctggcatggggcaggatggcattgtgcagctgggtgcctcctatggggtacccagttaccatggcaacacaaggctggagaaaatggactgggccaccttccagctggagatcaccttcactgccatcacagacagtggcacatatgagtgcagagtatctgagaagtctcrgaaccaggccagagatctgagstggactcagaagatttcagttactgtaaagtctctgggtaagtgtcaaaggaagtccttttctgcacctgtatatcactcaattcattctgcagtggaactggattgcgtgttatcctgaatcccccagtgatggtatgtgtaccctaggacacagagctagtctctggctaccctctctgtcaattaatctttaaagattcttcatttttgtaaagatcatctttagagtgcaacttgtaaattgttgttcaaggttaaaaacaaaatcctatggatcagcttatagacgagtatagctgagcctcttaccttctggcttttgacagctgtggccctgggattgcagagcccattgaagcatgtgcaaaagggttctgatactgaacccacgcatgggggtaagggaaggaggccagacgactagggtggggagtgctccacccactcagcagcagctgtctaagtagcagattggagaaacrctgcctatttgttgtggctgctgggaacagtcttagaaaaggatcaactttgcaaaattgaggtcacagttcaggacagactgtactgggaatcaatttctactctataaaataggaaactccaaatgtacaaatgcatggtcctagtcaaagaggtggcaactagaaaaacttgaaagtgctatattttaatctggtaaatatattagaaattctgtttcatttttctgtctagagtcaagtttacaagttagtctgatgagccgtcagccgcargtgatgttaaccaacacctttgacctgtcctgtgtcgtgagggcyggttactctgacctcaaggtgccactcactgtgacgtggcagttccagccagctagctctcacatmttccaccagcttattcgaatcacccacaatggcactattgaatgggggaatttcctatcccggttccaaaagaagacgaaagtgtcgcagtctttatttcgttcacaactcctagtccatgatgccastgaggaagagacaggagtgtatcagtgtgaagtagaagtttatgacagaaattccctakacaacaaccgccccccgagggcttctgccatctctcacccactgaggatagccgtcactttaccaggtaagtgtgacttgaaattaatccctgttttaaaaacaaacaaatagcaatcctcccattttgggtaagttataacaataaaacataaaatactttctcccatatttgttctatctaagtaagcaccacatgatgaatgatacccaggttaacattgagttagtatgcatgggttggccatactggttgttaaaacattgaaataccttccatgctggctaattgctgctctctacccattccccattttcccctaagttcccaccacccagcaactaaagggtaccacgtggcacagcagggggcctctaggacctggctagaggggagaagaaatgttttggattagtcactgtccaggccttaccagttagtaaacatttgcagtgtctctgctagtggtagggataaggtaaattccactggaatacatccacctacttctttgtaaggtgttaatgtataagagtcagagaatttattattacaatcaaatataatccatctcatcaactgataatagagcataggagttaaaagtgagatactacctaggcaaagttctgctgtgtcatgtatcttctctcttatagtttgcattctcttaggaakagtgatggagagacgttggagtcatttagatctgacagtcactggatagcagaacagctttggatgagmcacttaatctgctgaagccttagttacctgatctgtaaattgttaatgtgcaatttaaatatggtgacatatataacatgccgagtacctgacacaccaagatgacgctcaaacgtggtcactgtcattattctctctgctgctgtgcaacatttttggtaatagtaatgatccccttgttcatgaattcatgcttaattaatttgtcctctctgtggtatttgcaattgctgccccaatctgtcttcttgaaacttcttttttccttggcaccatgacacaagattttcattttctcctccactgatttattctttaaagaaaacagtttctctggattctattcttagctttgttctcttttcattctatacgctctcctgcagtggactcgtccctacccatggatacaagctgtatgttcacaactcccacattcattatcttgaccaatttctcttctgatctccagactcgtatatccagctgtctccaagacatgcctgcactcattatgtcaaaacataaacccaccattatcatccaaagctctttcttctgcattgccccttatgtccccactccccaccagtgacccaagttgaaaacctgagtcatcacaactcttatgttcaccttgtatctaaactcccacagtgtgacatgcaaggtcctttatcatctggtacatttgtgtctttccagcatcatctccttcaactttccatcgtgaatttgagcttcagccacactgaattactggcagctcctcaattgtccatgttccctctcactctcaaagtctttgatctagttgcatcttttgtgtggcaatccttaacctcttctccatcggaataattcctataaacccttaagactcagctcagaattatctcctccaggaagtctcccctcactcctgtatttgggctaggagaccctgctgtgtgctcagataggcacttctatatacctctgtcttacatgagggacatgaggaacaaaaattttacactgaggccaggtgtggtggctcacacctgtaatcccacactttgggaggccaaggcgggcagatcacctgaagtcaggagtttgagaccagcctggccaacatagtgaaaccccgtctctactgaaaatgcacagattagccaggcatggtggcgtgcacctgtagtcccagctactcaggaggctgaggcacaaggatcgcttgagcacaggaagtggaggttgcagtgagccaagatcatgccactgcactccagcctgggcgacagagcaagactccatctcaaacaaaacaaaacaaccaaaaatctcacacttgagaaaggtttctcaagagttatttcagctgcacattctaaatgtggaagacagtgatcagggcaaatatcactgtgctgtggtagaatggctctttgtctacaaatggcacttggcaccatctctaagcctctgtccctgcacttgtctccctctagagtgtgagccactgagggaagatatccacagggcctggaattgtctggcacataatatagtgtgtgcttcataaatatttgttgaaggaagagtaaagggacctatgggcaacatcaataagcagttaaaaaagtagagtgggtgatgtcagcaagatgctagaagaagatttgggaacaaggattgtcactcatctttctgacaaagcagaaaagctgctggggycaaagattagttggctccatatctatacaatgttcccacagttaagtgactgcaaagacacacacagttttaatcactcatgtacaacttccttttgtttacccacgtttgaaggcagatacaactagagtttggaaattgtgaatccagaagtactctgcatagtaaacacacaaacacagcattaatagggccactttctcccaatctgatacatgaaatatgacagaagagatgcttgtgcttaaataccgaagcagtatcatgtggaagagagatactgggcttgtctgtgtgacactccctctgccacaccacccctaccaagcacaggtagcactaggactagtggatggaagttatgaagagataaagttcaacttgatatcagaaagcattctggaggggcagagctgtccagagatgaaatgggctgccttgtcagctagtgatgctgttcaaaagctgtatgagcagtgagtggggctactgtagagggagttcacccatatgatggcgggaggatgcagtgtcatacttgacctctaatgtctctactaccttaactttctatttcatagcaaagtaactgtttcatttttttaaatttagagagcaagctaaaagtgaattcaaggagtcaagtccaagagctctccatcaactccaacactgatatagaatgtagcatcttgtcccggtccaatggaaaccttcagttagccattatttggtatttttctcctgtttccactaatgcctcttggctaaagatcctggagatggaccaaaccaatgttataaaaactggggatgagtttcacaccccacagagaaaacaaaaatttcatactgagaaggtttcccaagacttatttcagctgcacattctgaatgtggaagacagcgatcggggcaaatatcactgtgctgtggaggaatggctcctgtctacaaatggcacttggcacaagcttggagaaaagaagtcaggactaacagaattgaaactcaagcccacaggtaaaccttgcgagtgtatcctcacaatgtctgtctgtctgacggctgttttctcttgggcagctgttctatggagtgattatgtggaagtaaaaatatgacctaaagtcataggaacagtatctaccwacacatgactgcaagaccgagtagtccaccaaaggaggggaggtcacttaaggcaatccaatctgaggttttggggagctgaggtaggagcaatatccctttgattggtttgcttctcaacctggcagcctggtctgtgcagctacccagggtatygtatctccagatctctatmataacaagctgtgtcattccagtggggctctactgtaatttggcagagaaagagtaatacgaagcatatttctcccactgtgaacagaaactgtacaactctatggggatgtgtggagaaattgcttctcaacatttagctgcctaaacataaggcaaataagagtagttaactgttggaatggcttactgagggagtctcctcttcctcaggagatctttaaaaatgtaatggaagttccgcactggtctaagagtgccactgtctaaatgtgggcagggttgattaggtctctcagcataggttaggtcacttccagtgttgattaaaattaaatgaatgtcacagccaaggttcaggaactggccaagatcctacagcacaatgcagagaagttgatctaatttggtgcttgaaatactattttcaaggtaacgctaaaaaaaaattagatgataattgagcattactatgtgttaggcagtggaatacaaagataaagaaggcacagccctggcccttaaggagctcccagtctggtgggacaacaagggcagaacagcagcttggtttggggtctcttcctgccctctggcttcccttctgtatgttcttcaagccccttcttctccctgctaaatgtgtgtgttcctcagggatagatcctgggcctgttttgcttcttattctctgctttcctcagaatttcttaaacactgccctggtttcaactaccaccttctagatgataactctgagattttgtgcttagccctgatctcctgagctccaagccttcatacccaactgcctgctgtacatttctacttggatgcccccatactcagcatgccctaaattgcacttagcatctctgccatctcaccatgctcatttgcacttctgcatttcccatctgtgtgattggcattctgtctcccagtcatccacaccaaactcttgaccacatgtgcatggccgtcttcaggaggcagccactgcttagctcaagtgcttcccatgtagaaatgtgggctccgtgttgtcagatctttttgcatatctagagatgcctaaaatcttttttggtgacatctcccagtttgagaatgtccacaactaattcacttcttctttttctttttttttagacggagtcttgctctgttgctcaggctggagtcagtggtatgatcttagctcactgcaacctcctcctcctgggttcaagcaattctcctgcctcagcctccagagtagctgggactacaggtgtgtgccaccatgcctggctaatttttgtaattttagtagagacagggttttaccatgttgctcaggctggtcttgaactcctgacctcaggtgatccacctgccttggcctcccaaagtgctgggattacaggcgtgagccactgcgcccagcccagttctcttaaaatactgcaagtgtcaagcagaacatacctgtgggcttggtgtggctgtggacttccggttgtgcacgtcatttagggaacaagttaaccaagaggccccagaaagatgctgagaatgactggtcagagttgtaagggggatattttctctgaggttggaagaaaagaagtcaatttcaaggagaaattggactccagtaacaaaaaccacatagaggacagaaaaggactagagggtcccttgaactgggaaattgggccctggccaagtaaagtgatgggattggaagccagatcacaataaagtaggaagtaatttgagacaaggaaacagcaacagtattccatgtgctaatattccacgtgctactccatgaaggaaaggggagagtaaaaatggtaactaagaaagagtccaagatcagacagaattattctcttaaagacagattaataaatgtgtttgagtcaggcacagtggctcatgcctataatcccagcactttgggaggccaaggtgggcggatcacctgaggtcaggagttcgagaccagcctggccaacatggtgaaaccctgtctctactaaaaataaaaaagttagccaggcatggtggcccatgcctgtaatcccaactgctcgggaggctgaggcaggataatcgcttgaacccgggaggcagaggttgcggtgagccgagatygtgccactgcactctagcctgggcgacagagcgagactccgtctcaaaaaataaataaaataaaaataaataaataaataaataaataaatgtgtttgtagtggaattgaaaatgtaatgcacactataatttctttattttgtttgtaactactttggctgttattctaaatcctcacctgctggttagcaaggggaaaaaaagtaaatgtcaaaatctctttaaaactcagtctaatccaatcatctaaatagctcccatggatggccttctaacacttgcatcaaaatgttcagtctcttggatggcgtcctctctctctgcgtttacacccaagataatatctgggtgtatgggaggagagtaatttgctaagaatgaggggtactggtggaatacatggcttgagggagctgctaaaagttgtgaatgaccactttgggaagtagaggaggagtgaatcaaggrtaagtaaaagcagcaggcagagggccctgcagaagctgtgtagttttcaatggcagggtccagcaggcaagcagttgggctaaagaaggaaagaggctggtttgattcctagcagagaatgtcctggcaaatgtgagagaaaaacagggaccaaggacaagaattaaaatgaatgtggctggacgtggtggctcatgcctgtaatcccaacactttgggaggctgaggtgggcagatcacttgaagccaggagctcaagagcaatctggccaacatggtgaaaccccgtctctactaaaaatacaaaaatcagctgggcatggtggcacacgcctgtaatcccagccacttgggaggctgaggcaggagaattgcttgaacccaggaggcagtggttgcagtgagctgagatcatgccactgcactctggcctgggtgacagagcaagactctgtctcaaaaaataaaaataataaaaaaaataaaatgaatgcactgatgtctaaagaatataagatcttcccagtgagaactagatttttcagaggtggtatccaaatctgaaagtctgcattctctaatttactgccattttattttctaggaagtaaggtacgtgtctccaaagtgtactggaccgaaaatgtgactgagcacagagaagtggccatccrctgcagcctggagagtrtaggcagctcagccactctgtactctgtgatgtggtactggaacagagaaaactctggaagtaaattgctggtgcacttgcaacatgatggcttgctggagtatggggaagaggggctcaggaggcacctgcactgttaccgttcatcctctacagactttgtcctgaagcttcatcaggtggagatggaggatgcaggaatgtactggtgtagggtggcagagtggcagctccatggacacccaagcaagtggattaatcaagcatccgatgagtcacagcggatggtgctcacggtgctgccttcaggtaaccaggggtttatctaccgcgagctcatggtcaggagaatacatggctctcctcttatcctctccctctcacctatcttttgctccttctgaagacaattttcagactgaagacaattttcaggttccctaaagaagatgactttgctgtctctctcaatagtaactcatttgaacaaacaaggtccacatgagattttggcatagacacttaaatatcgggagcatctgacaggtccatgtctttctgctggggttcagggagaaggtgggaggtgagcaataagctaagcttactgagggaaagggccattggagaagtaggggtgtggtcttggtgccagacaccaggaagcacaaagggaaaatcatcaataaaggtaacaatcctaagagaccagctagctttagtgacactscttaggagggacagaatgctgttgagaacatatgggaacatctaagaagtagggataggtgcatcccagcgcagcagggcttccagaggggaagtcgaagctatccgatttgttccttgaggtggtccatcattgtttttccctgttcattcctcagcagaagttttctcctgagtgccaggccaaaatgttttttctatcagcctttttcttctttccaacaattacaggaagtcccatactcatgagcacattccgtacatgttttcccagtggaattaataggctctgtagaatcggcagtttttgcagtagaataaatagataagaactgtaaaaagtatacagtctgtgatgaaaagcgtatcttctctgaggcagatgggatccttcatagcatacatattgttaatctttgtgagatccttgtaaaacaggtatayggtttttaaaagataaacctggaaagaaaacattaaaaattgagtggccttcgtattcttcagaaaacctttgtcatgacaaactgagggttttgagggtaattaatgttgaggatttccaaggaaatccctgtaatgtaccttctgggctcctccacctggctgttccttcctggtagtcagggaggcagtgtggggtgataaaaaatcccaggggctggaatcwgaccagcctaggctcaaatcacagctctactaccaataccagctatgaaatcatacgctggttacttgctgtgagcctcagctttctataaaatgaagatcacaatataaatatgtataaagtatccagtacagtgcttggcacattgtcagtgctcagcaaatgtaatctccttttccccttatgcctccaaaccygctgcacatacatatacacacaggtacacacatacctacatgtgtacatctatgtgacaaaataatgacacttgtttaataaataactatatcaggttctgaggccacaaaagtgtacatgacagagtctgttcccaccgagcttggaatccagtgggagaaatcaagtccaacataacaggtgtcatcaaagaagtatttccagtagactaggggaacaacagaggcagggctggggtgaagtgctaggtagggagatgatctgggaaggttccccagagtctggggctcatgaaaaggaagaaacatattttargaacatgaaagagtatgcaagatgataataagatgtaaaatttcatgttatattcggggaactcctggtcattgagaatggcaggaactgcagtctctatggtacagtggcaagagatgagaccagtgaggagggaaaggaacagatgatagatcccaaatgtgtctagagtatgaagctaagaaggaagaactttatcatgacagtgatggagtgtcattgaaaaagtttaagcaggggagtgacatgatcagattttccttttagaaagttcccacattaaaatgaattggaggtcgggcacagtggctcgtgcctgtaatcccagcactttaggaggccaaggcgggcgggtcacctgaygttgggagtttgagaccagcctgaccaacatggagaaaccctgtgtgtactaaaaatcctaaaaattagccgggcatggtggcccatgcctgtaatcccagctactcgggaggctgaggcaggagaatcgcttgaacccaggaggggaaggttgcggtgagccgagatcacgccattgcactccagcctgggcaacaagagcaaaactctgtctcaaaataaataaataaataaataaaataaaataaaataagtgaattggaggggaggtccacagtacagtgcaggtagtatatgaaattgtggaaacccaactggggaaagatgaaggcctgagctaaggcggtacccatgacgactaagaaaagaacaggcattaggtattaggaggtgtaatcttcaggatttagaggctgattcattgtatatagagggcaaaggagcagaaggagagaattaaggattaacatttggactctagcttagatggatagtcgggtcatttaccaagcaaggtaatatatgagagggatttggaggggaagattagttcagttttgaataagttgggctggaactgagttcagagtaactgtgagttattgataaaggtctgtccaatagacatcaagactgccaaatgggatctgcaccagagttgtagattacaagtcatccataggtagccagtaatgatgcccaagggtggagctctgggataaattgccatttctcagggagtggagagcctgtgaaggagactgataggagtgatggagagctgggaagggaatcaggatttggtggtaccacagacactaaaggcagagagggcatcaagagggtgaggagagtcgacagactcagctcttgcaaagaggttgattaagataacagtgggaaagtatccattggatttgacattatgggacaattacagaaaagttatcagggaagtcagactgcagcaagttgaggggagagtgggcacatcaatgcagattgctctttcaagagctttgatgtcaaggggaagagagaagacaataaaatggcaaaagttgtcaaaaaaaagtgaaagtattttagttttgcttttttgctgttttggtttgaagatgatacagatttgagcacatttatgttttagaggggagaaagccagcagaaagaaaagaaagaaagagagagagagagaaaggaaggaaggaaggaaggtaggttaatagaagagtagatacaactgacagtccaacatcagaaagaaagaaagaaagaaagaaagaaagaaagaaagaaagaaagaaagaaagaaagaaagaargaaagaaagaaaagaaagaaaagaaagaaagaaagaaagaaagaaagaaagaaagaaagaaagaaagaaagaaagaaagagtagatacggttgacagtccaacatctgaaagaaagaaagaagaaagaaagaaagaaggaatgaaggaaggaagaaaaagattaatagaagagtagatacgactgtcagtccaacatctcaccatgcatgcaccatctccttcctggaatgctcctccatgccatctttccctggtcaacactctcatccttcatccagcaacttaactgccactgcctcagagacttcccttattcttttagcccccacacctgcagttacctgtttaacatctgtcacactgctagactatactataggcaaagataatgagtgtctcattagtagcactagcacagtgcctggcacataggggatgcttaaatgtttactgaatcactgtgtaattgcactcctgttgagtaccaggtctatgtgttatcaagatccagttcaaatataatatgctacctatggtcacttaacagatggttttccatgctctctatctggctatcccagcttgggctggttttagggccacacaataggactgtagagcatgtggctcaagtgaaggcaggaaagttaagagacattttctcggagaatggaccttgccttttcttctctatcttatttccttatcagtgactaagctatggcagagacaacagcttcctcagtctttttaccttacccttagaccctagacattaaatgtcttattctagagaattgtctgtgattaattgataggccaggctataaggcttcctgggaactggattatctgtagtagtgtggtacttgttactatttcccagcttttatttgggtaaaggtctatttagaaattagatccttgggccagatgtgatggctcccatctgtaatcccagcactttgggaggctgaggtgggaggattacttgagcccaggagtttgagacccctgtctctacaaaaaatttaaaaattagacacatggttgatgcacgcctgtagtacttgctactcaaaaggctgagatgggaggattgcttgagtttggaggtcaaggctgcagtaagccatgatcatgccactttgctccagtctggatgacagagcaagacactgtcaaaacaaacaaacaaacaaacaaacaaagagagagagagagaaagagacagagaaagaaagaaagagaaagaaagaaaagaaagaaaaaaagagagagagaaagagaaagagagaaagggaaaggggagaagggaagataaggaagtggattcttgaaggagctgtgtgtctytaccacactgaagtatttggagatgccaagctacttacctgtgcttcccagtacctccagcaaggcctagcacatggcattcaacaaatgcttaatgaaagaatgagcaggcacgtcttcagttgggttgaaacaggatgctgtcagtgattcacttattctgggatgcacttgttatcaggttaccttaccctacttttatttcttggcaagagccaactcccacatggctgcatgtttggggttgggtagtggggaagagttggcagccccctctttatctcacacctcttttcttctgaagtcagtgtctctgaggaaatatcaaaaaggagtgctccttttgctgtgcttggctgtgggtggaagcacgttctaaactaagcctcatgatgaagtgctctcattacatttttggctttgttttgaagaccttgtactttgagcattgggcacttacttagattgatcaaaatgccaaaccttaatggtttgaatgtcactaattctaatccagatatgggtgagaggcagatggtgggaaatggtgactgtgggatgcagagcaaacactggcctcccaggagaggtgatttaacrgcacaggcactaacagttgctagctgttggccacttcagcatggtaaggggcacaccttgccatcctttgatggcagattgcactaagctgggcagcctcttccccaccaagatagccaagccctctggctgttccttcatgctgaaaagcagagtagcagatttatttccacctcctgtgtagtggccccatctcgccatcattaccccaccattctagcaactgtaatacctggtgctgtggactctmacctcacaattctctgcctcccatgagtagaaaaggaagccagggcctcctaagtaatcatttcagtctttgctgaatgtcacccaggtctgaggacagggggactagagatgtaagggagwgagagcctgtggaggaagatggccaagcctggggtccctgtgggagagatatctgtaggctccagccctgttctctgtctgttctcttgggagaaggtttcctgtgattttcttagctttctcagtagcattctagctaatatttattgcttgctgactccacaaatgctttaggcacttcgttagatgctttattatacattatctcatcacaactctagaaattgttatccctatttggttgatgaggaaactaatgattaagagaggataagtaacttatccaatgtcaataacagcacattgaagattgaggatttgaactcagctctctttgaaacacagtaggtgctcattcactactctgcacaaatgstcacagccagtgcttataatacctggactccatggctccattcacttgcatcattgcagtctatgcttccttctagycacgggccttcaaatgtactcagataagaccgggggagaataactgtagtcragcagggtcattggaagaggggtcagataggatgtggagcagagggatggtaaagaattcaaaacctaactttatcattgctcaccatttcaaaaaacaaaactaaatttaggatgaaggatacaaatgagatcagagaaaatccaggccatgaacctctgctgctctttgccagccccattcagagctgccagcctaatgttcagtgatgatctgtactttgtatagcatgatggcagccatccctgggttcccatgtgtggaatgtactcatgcaattgattcattcatcaggctccattgagaccctgtgaacaaagagttgaggaagataaaaagacacacaagacacaggccctaccctcaaggagctcacagtgcaggaggtgagcgaatgtctagattctttcttgactatcatcaaagagatgttctttaacatgtaggattcgtcggcaatgccaaaaatggaattcttgcagcaggaggttggtcaaaatgacctctaaacctctttcatctctaagcatccataatcccatgaatcctgtagcttaacctttgaagaagaaattgcttatgtcattacaattttccagtaaaagcacagctacagttagcattgaatatttcagaacagccctgatttcagatatcatgtcataaataaatgtaattggaagactacatttagtaattggtctctttaagcatgtgtctttctgcttcaatagactgtttcctgaaacctgtggtgtttgcagtcctctgggcctttgctttcctggccgtgtggccaggagccactttggggctgcttgtgcgtgctctgcgtgtgtatctgctgattgatagtgcttcccggcggactgcagctgcgggatgatcatatgcttcagcatgcctttatatagtatcttttgcccatgtggttgcagtcaatccaatttaattcagatcagcaaaagttactgagcacatgtgctaggcactgtaggggatatagaaacaaatggcactatcagacatactcaagtaactatagtgaacaaaggagacgagtaaaagggaattaaagaggcctaaacaaagggctgagtgagaacgggatggaagagaagaactgtgcctgcagcaaggtaggaagagctgagagagtaggaagtgtgatggagctaggccagaaggacctagaggctcagatgcatggagcatgtcaggtggtggccacagccagagcaacacaggaaaggagtgggagggagggggccggggaaggaggagacccacagggagggccaggcttgggtcagcgggggtaggggcttcttattgtgggtgtgattgttttataaggacagtgcagagtgcagggcagagtgtgtgtgtatgtgtgtgtgagaaagagtgtgtgcctgtgtgttggaggagcagcagtgggaataactcagttaaaaattcaggactggcaacactgttgagaacgagggttgaattatagatatcttttctgaagaaagaagattaaaggagaggttttcttttttgttttgtttttcattttggctgttagttttaagtaggtcattggaacctccagtggttggaaatcgcagggcaaggggctgttgcattagaagagcctgttccaggagctctcttcccccagtgctctgtcctgtgctcctcatgatttcaggggcccactgctatttggccccattatttttacatatacytgcctataacaataaatcccaggagtgtttgtaattgactagtacaaataagttggagatgaattactctcttgtttctcccttcgttgcagagcccacgcttccttccaggatctgctcctcggccccttthctctatttcctgttcatctgtcccttcgtcctgctcctccttctgctcatctccctcctctgcttatactggaaggccaggaagttgtcracactgcgttccaacacayggaaagaaaaagctctctgggtggacttgaaagaggctggaggtgtgaccacaaataggagggaagacgaggaggaagatgaaggcaactgaatcccaagaggcacctgcagccaggaaggaaaggtgggggctttttaattgggctaaccagggtgtgaatgaatcctggttctgtcctcaactatgtctgcggccttgggcaagttacctaggaatcagagggarcattcactgagtgcttattggttctacgcactgttaggtgttcctttgtgtcttacctcatccacctctygcatccccccttggaacaagatagcatcattaccctacatctcttgaaggttcaggtccctgggctgcaaggagataagaggctccctcacacagcctctggagggctaaatgagatcctacagcaatgccctggtggggcttctctctccctcttatgtcacttgtcacacctgctctaggtaatcattttcctccagatgagaggtgtaggaaaggacctgatgccagcaaggaaaaaggaattggtaacatgctctttgtttacctaaaatctgtccccacaacaagaatgtaacttccttcgaggcagaaattcaattttcttctcccagcccacctacaaaggcccactcaagagcaagttctgtgtaaaggtgcttaactaatacaggttctttgacaaaatgataaaacatttgtaacctgagtttggggctttttgtttattgtttgataagactttttattaagtaattgctgagcaaaaactttgtaaaaactcatgtaacagtactccagtcagccccccaaggcctcgtacccctgcttccccctacacctccatatccccaccaaaaggtccatctggctcctggtgctcagccagtgccttattttctttgacctgacagcactgggtggtagggaaggtattgtctggaggagcagggttgacagtgccaccgttccctcatacgcctgcagggctggggtttggggcagcagtaggtcaagtctggttcctcaaggtctcctattctcagtagcaaaaagcagccggtgggggtggggtgtaatggcttaaagmtttcaacagctgtccccactgggcctacagtcccctcatctttgtttcaaaagccgctcaggccctgttgtagccagaattggaaatcaatcagtgccacctamagacttgagaaaacacatctatttattatctatgtgaccaaccgagttgctttaacactcgttaatttgcatttccaaggagagcaatttagttttaattatttgatcaggcacacacgtcctctccaaacataattagttccttcctaaggggattattggtggctatgagcactcctactatggacctaccagttccttaaactcatgtcccttcatagcctgatttaaaatactccaaatctttccttaaacatgtcagcacatttgtttcttgtcatccaggtaagggagcatatttttacaaacaacaaagctgaaatgaagacttttttttttttttttttgagatgaagtctcgctctgtcgcccrggctggagtgcagtggtgtgacctgggctcactgcaagctccgcctcccgggttcacgccatcctcctgcctcagcctcccaagtagctgggactacaggcacccgccaccatgcctggctaatttttttttgtatttttagtagagacggggtttcaccgtgttagccaggatggtctcgatctcctgacttcatgatccacccgcctcggcctcccaaagtgctgggattacaggcgtgagccaccacgccyggcagaagactcttagaaagtgtgatgaccccctgcccctattttttagaaacctgtattttaattcaaagggaaagagagcagaagtgagcctgggcagagaatcttggatggactctgctgcagccctctgtgggagcactcttcaccccatccctcctctctgctcacatggacacctccttcaagcttctagctcaaacacctcttccccttttgaatccagcacagagatagcacagaggagatgtaagcagacagggagggtctcctgggaaagyagacatttaaccwacttgagcaatcagcttgttttacagcttcctgccttgctgcctgtttcttcccaagccccgtgtggaatgtggtgacctagtcacctggaaccagctcctgacagaccccggcaacttctagatgaacccaagtgaactttcctcattaccatcctgaagtcactaccccagggggagctatagcttcatgaccgtaamatgtgacctgtgtgctggcaggacgactcactgcggctgcgccactgggacccctcccctacatgcaccaatgcactctctcccctctccatcaccccataaaaccctcctgtcactttccttcagagacaccgctttggagagtattcccagcgctctccttgcttgtgacaagtaaaaaaaaaaaaaaactccttttcatcaaaactcatgttcttgtggagagttatttgttactcgccaggcaaacaaacgctggtttttttcagggaacagagaccctcaaatatgaaacggttccggccagagcacagcatgggaagtgtgagttcccagtgggtacctgctgcatgtcaggccctgtgctaggagcaaggggccctgtggtgactcagacacagccccatgcccctgggatgctcaccttgtttgtcctggatgctctgctttcattaatgggacttagagcacctttgatagtctaagcagccacatggcactctttgtcccataggcaactaaaatcctccaaaactaaaacacccccacagtattttcttctttttaaatttacagaataaaatttgccctgatccagttcagcagacattttatgtgaaacctcttctctctccaattacatactgtttacctttggtttttgaaacttagtggagagctttacttttacttattgatttcagcttttccatttcatgccaccacctggttttacttttggctttttgtgttataaatcttccttggcaaaaggacaagcctctgtctcaggagttgaccaaccagggcctatgggccaaatgcagcccaccatctgtttgttttttaaaatacaatatactggaatatggtcactcccattcgcttacatactgtctgtggctgctttcacgataaaaatggcaaagttgtgtagttgccacagagaccataggacctacattgcctaaaatgtttattattctggccctttacagaaaacatttgccagccctgctgtcctttaatgttctgtctctcttagccatgtattatgtccctgggaaactgatttgacctcttatatctgaatctcttctatatctgattaatctaataaataatcttaggttttcaggattggcatctagtcccagccattctgaagtttgactccgctgtaccggcctcacactatagatgggaagtttatcaccctgcaacgtttcacgccatcatactgagtacctactctgtgcaagataagatgacacagggatgattaaggcatggttgctgttaattatttttattgtattgagatgtatagaaaaaaccgatttatggcagaagatgaatgcaatggtataaagtcatgtgccataataatttcttacaatcgtacaggatttttttcattatctcagaattttacagcatctctatacaaaaggaattgttattcctgtcctacaggtaaggaattatagctcagagaggttgggatttatccaggatcacccagccatatgcagaagagtaaaagctcaaacttaggtctgctgacaagtcctggactctttccacaataaacactctttccacaataaacacaaaaaatatgctcaaatccattgctatgggggaaaatctggatataataatagccactttgagtggttgttatggtgatcaaatcagatacatcaatggagataagttttaaaaccacatcaagtcataaatgaatgtcagcattaacccaagtttttctaggacttaacctgtccgtgtacataaataaaatgtaatcaatagtaataatccaaattctacaggctttccctcccagaatatttacacagggtcttggccatctacagtgtcctttagctatttctgggggatttcccaaaactggaaatttttttttaaagagatgaggtctcactagattgctcaagctggcattgagctcctgagctcaagtaatcctcctgcaagagcctcccaagtagctgggtctacaagtacacaccaccacatctggcccggattctgtgaattcacatgagctcacaagcaagtccattcccatgtggttccctgcagctccgttgggctctgcgggctcccaccgcagctggcatgccagagcacatgagatgccaagctgagtcgtgttcagtgataagcagtgaaaagggactctttctctgtctttacattacactcttctgtaaggatacaaattcaagattgtttgcacccgtgtctctaaagattctcttgtgaaaactgttccattagcatttgcccagtatctcctttctccagagtccagacaccagcaagtctgcggccaggctgggaaagacttcatgctattctctccatttcccattgcctgttcccagcagcctctgcactaacctcctcatcacaggtcctcttttcctccagcaggaaggttatgcaattgtgctgttggggagctctaccacttggcagacagagcctgagaagtctgcattccctgtaggctcaggtgggaattctgtcaaactggctattaatttttactcctaataaagtgctacaggcatttagaaatcagagacaacttcataaagaagatgtaagttgaactgggctttaaaaataagaaaatattttgacaggaaaagggttaagcagaggtctggacagaggaagccccatgaaaagtgcagtgcttacaatagctttgggttaagtgtcagatctatgaaggggagcaatgggagataaatctggaaaagtagttagagcaaaattctggggttggggaaggacagaagaacagatcttgaacatggataatatcttggacttcatgtggtggacaatagtgagccagtgaatgtaatgtagtagggaaggagaattgaaaagcaacagcatagatgataggtggggttggagtgaggatggcagtggtacaaaggtgaggcagggaagccagctggaaaaccatcttcactctcttaatttgtgtaatggctatcacaccaattttgtgagcattttgagtatagaaaaaaattatcagaaagtttcaagtatcaagctcatagaggtagctcctgtatattaaacacaatgacacatgatgagactcttcttgtgtctaataaatgctcgttaacctagttttctactgataagtttagagataagagacagttccatccattcattatattaactggctttccattttttaaaaaatttattcacctttacatttaatttacttgttagaaatttggagtttctaccatattgtctcttaatccaaggctccttctgaaccagctctgactgccaaatagagatgttttgagttgaagcataattatcacattaagccatttaccgagacgagagactatattggatgaggacagtgattaagaagtttctatggtataaataaccagcataggaaaatccaaatttattactcctataaggtcacattgtcaagggaaccgagagggtgtgtgcttccattttaaactggcttttcaacaataggattcttggtggacttatctcaccctagtccctttctgggtaccttgtgctccagccacaccaaattacttgccaggtaattactccccaggtgtctaccaaacatgcccctgattttgtgtctttcatttggaaaatttctccttttttgtgatcctgttcatcccactcaattgacttcaatatgtgtttattgctaagggtgtccacataacataccagggaaaatcaatactgtttgttctttcgtttgcatcttctgggctggatcatgttcatatagagagttgtgatgcaaaccaagatctcagaaagctccctaccccatctcatgccctttggtaattataagattttgagctcccataatcttatcttggttcctctctcccaaaaccacactctgctgggaggtgtttcttggtggcctgatgtgcacacgtggcacacaaatacattggaaagacaaagtaatatggaagctactgtatgccactggtgcaagtttaaagcctgctaccttttgccttttattatttacataggtacttcttcagtgtgaggggttttcaacattttcctcatgataacagtcattattgagaggctcaggccaataaaacaaatacatacgatgacaatagcaataaatgttctttgatgacacgcatatgtatatatgcagtgagtttctaatcaaaacttctatcagtaatagttatttgggtacaataatactatagaccagggatcataaacttagatgtttcagcatctaaggtacgtaaatgaagagaaagtatcggtctggaggaaatccttagggagggatgaagattagagcaattggagcatgcatatctattgaaaggcacttaagttcaacataagatataagatattgtgcaaggtaatcaaaacacttttaggggtggaattctgttccttgtaatccctgcatcacatcctaaagccatcaataaatgctaaaactctgccaccaaaatagcatctgaaggttatgcctatatcttaaaattgtgagttattggcctatggtttcttctaaaagcttcattgtcttaccatttaaaaataggtctaaaatacatgtcaaattgatttttatataaagtaatttttgtataaaatgtgaggtagaattctcgtgcactgctgatgggaatcattctgttttccatagcactggcagagcagctgctatggaaaacagaatggcacttcctcaaaaattaaaaatagaattaccatatgagccagaaattttacttctgggtatatacccagaataattcaaagtaggggcaagaagagatatttgtatacccctgttcatagcagcattattcactaaagccaaaggtgggtggaagaaagccagtgtgcatcaatggataaatggatggataaagaaaatatggtacatgaaaaataatacaatattagtcatctttaataagataataaattctgacacatgctattgacatggatgaaccttgaagatattatgctaagtgaatgagccagtcacaaaatggcaaatgctatatgattctactcatatgaggtacctaaaccagtccaatttatagagacagaaactagaatagttgttgctgggcctgagggaggggtgatagggaatgattgtttaatgatttacagagttttaatttgggaagatgaaaaaacttctggagctggattgtggtgacggctgcacagcaatgtgattgaacttaataccactgagataagcatataaaaatggttaaaatggtaaattttatgttatatattttaccacattataaaagtgagataaagatcacggtttaatttgctccatatgattatcccattgctccagtaccatatttttaaaaagagcattctttccccactgtagtggttttatgtattgttcaagaaatctttgcccatccacaatagtctgcagtaatacattaaatcacaaccaatcatgatttaataacaatttactactgagcatgatttcttacagggaatgcaaggttggtttaacatttaaaatttaatctatgtaaatcactacattaacacttgatcatctcaacagatcaagaaaaaagaatttaataacattcaacacttcttttttttttttttttttttttgagacagactcttgctctgtcacccgtcacccaggctggagtgcagtagcatgatctcggctcactgcaacctttgcctcctgggttcaagggaggattcttgtgccttagccactcgagtagctgggattacaggtgtgtgtcaccacgcctgactaacattcatatttttagtagagatgggattttgccatgttggccaggctggtctcaaactcctagcctcaagtgatccacctgtcttggcctcccaaagtgttgggattatacgtgtgagccaccacacccagccttaacacttattcttaataatatttctcagtaaactagtaacagaggggaattttctaaaattgataaagtatataataatt

SEQ ID NO: 8815 - DNA, 22242 bp, Homo sapiens
aaggcatagctccttgcttatcagtgctacaatctagataagaagagatttactgaaaacctacatagttgtgaattattcagatgctaggtggtatcaggattcagagaagggaaagatcaaattgggctttgtggaagaagtggggattgacccaggcactgtaggttgggtagaatttgaattggtgaggaggtagaaaggcaggagattcctaacagaataacataagcaaaaggagcatgacaaagggcagaaggagggaggagagatttctgttgggaacttaaggctaaaaataagaagtgaagtctgagagggcctcaaatattaggctaaggacttaaatttataagctgtaaagagttactatgtttgccaggtgcggtggctcatgcctgtaatcccagcactttgggaggccgaggtgggcggatcatttgaggtcaagagtttgagaccagcctggccaacatggtgaaaccgtctctactaaaaaaaaatacaaaaaattagccgggtgtcgtggtgcatgcctgtaatcccagctactccggaggctgaggcaggagaatcgcttgaacccaggaggcagaggttgccatgagccgagatcataccactgcactccagcctgggcaacaagagtgaaactccatctcaaaaaagaaaaataaaaaagagttactgtgttatggctgcgtgaggtggctcatgcctgtaatccaacattttgggaggccaaggtgggaggattgcttgaggccaagagtttctgaccagcttgggcaagaaagctagacaccatctctacaaaaaattattggaaaattagccagacctggtgatttgcccgtagacccagttactcaggagcctgaggcaggaggatcacttgagctcaggaggttgaggctgccagtgagctatgatcacaccactgcattccagacttggaaatagaacgagactctattaaaaaaagaagttattgtattttgttttttgtttttaagattttgggtttttgtttttgtttttgagacagagtctcgctctgttgctcaggctagagtgcagtggcctgatgatcttggttcactgcaacctctagctcccaggttcaagcgattctcctgcctcaacctcctgagtagctgggattacaggcacacagcaccatgcctggctaatttttttttttttttgagacggagtcttgctctgttgcccaggctggagtgcagtggcgcgctcggctcactgcaacctccgcccctgggttcaagcgactcccctgcttcagcctcccaagtagctgggactacaagcacccaccaccatgtccagctaatttttgtattttcggtagagatggggtttcaccatgttggccaggctggtcttgaattcctaatttcgtgtgatccgcctgcctcagcctcccaagtgctgagattacaggcgtggcccactacacatggccaatttcatgctttttaatggctgcttctcagttcccagttttccccaacatctgctctgtagtctttaaccctgatccttgtgctagaaggacagatgtttgtctaggacctgatctctgccctcatgatttggtttcatgtgatcgttatccacacaccttatgtatgtatatacattcctaccctccccctcagcacgtcatttcccctgtcacagttgcctgtgtccctggagtgttacacagtgcctcctgaagacaacctggccctccttcagctctacttccggaccctggttactggtgcgctccgcccacgttggtgccccgtgctctatgctgtggctgtggctcatgtcaatagcttcatcttctctcaggacccacagagctcagtaagttacatctccatcttcagaggaaggaagggagctagcaattgagctgcctctgggccagctggggaagaggtaagtgtcaagcaaggccagtggtgggtaccagccctcggctcagtgccacctctccctgttctgcttctaggatgaggtcaaagctgcccgcaggagtatgctgcagaaaacatggctgctggcagatgaggtagggtcagggccattaggagggtgggatattagaggatcttgggggacagagaccacaacaggatctcattacccacttcataagttttctttcctttctgcagggtctccggcagcacctcctgcactataagcttcccaattccacgctcccagagggctttgagctctattctcagttgccccctctgcgtcagcactacctccagagactgacttcaacagtgctccaaaatggggtatcagagacctaggatagttgatatagatggaaagatgggtacgttgtcctgtatccagcctttcaacagatgtctggccagacgaagaacattgtgtcctaatggtaggcaggagaccaaggagcagaaggcttgccttcctgggagcaggttgtttgagctgttttagagcagtgagccctaccattacatcctgatatctggggcttctgaaggtctgtgctgggagtgaagagtggcttagctatttacccgctctttggggacagggcaaactaaatgcatcccttcttacctaactcccaacccctgccctgggctgaggcatatgaatgctatagttgtgcattaaaataaatgttttttatctcctggaaatttgatctggactgatttcagccatgttagttcagggttagtatctgggggtgggttatcccaggtgaggagcaggactgctgtgagagagatggggaagaatcataagtgggaggtaaaaactttgtccacatctggagacaacaagaatgtggggcctgccaggcacagtggtacacacctgtagtcccaactacttgggaggctgaggcaggatgatcacttgattccaggaattcaattccagcctagccaacatagtgagaccccatgtctgtctgtctgtctgtcggtcggtctgtctatctatctatctatctatctatctatctatctatctatctatttctgagacagggtcttgctctgttgcccaggctggagtgcagtggcgtgatcatagctcactgcagcctcgacctcctgggctcaagccattctcccacctcagcctcctgagtggctgggaccacaggcaagtgccaccacgcctggctaattttttgtatttgtagagacggagtttcaccatgttgcccaggttggtcttgaattcctgagctcaagcaatccacccacctcagactcccaaagtgctaagattacaggcatgagccgctacacttggcctattttggtagtttctacattgttctttggtctgaattctaaactttaggctttcttagactgtcttttgctgtgtggattacttattgtgtttgcaagtaaccagagtcagagcagtgtgccaaggcctagccctgtcagtaggtagagagaacccagtcttcataaatggagctgctgaacacagaattatccaataggtttttttgggtttttttttttttttttttgacacgaagtcttgctctgttgcccaggctggagtgcagtggggcaatctcagctcaccacaacctccccctccctagttcaagccattctcctgcctcagcctcccaagtagctgggattacaggcgcgtgccaccacgcctggctaatttttgtatttttagtagagatggggttttgccatgttggccaggctggtcttgaactcgaactcctgacctcatgatccgcccacctcagccttcaaaagtgctggtattacaggcatgagccactgggcccagcctttttttcttttttttttttgagacagagtcttactctgtagcccaagccagagtgtagtggcatgatcttggctcactgcaacctccgtttctgaggctcaagtgattctcatgcctcagcctcccgagtagcaggggctacaggcatgcaccaccacacccggctagttttttgtatttttattagaagcggtgttttgccatgttgcccagggtggtctcagactcctaagctcaggcaatccgcccacctcagcctcctaaagtgctgggattataagtgtgagccacagcatgtggccccaataggttttattaagcaactactgtatcagcaaataccaatgattctcaaactttgtgacaaaaatcatctggaggatattttaaaacagatcactgggtcctaccaccagaagctgctgattcagtacatctggggtgaaacccaagaatctgcatttctaacaagttcccaggtaatactgatgctgatgttcagaacaaaccacacaaccacaatttgaagagcagtggcttaaagagactttgcaaggtaaattctgtgatctcatagtgtgatatctagtgttaagtagggcatagagaccagggtttttttgttttttgttttttttgagatggagtctcactctgtcacccaggctggagtgtagtggtgcaatctcggctcactgcaacctctgccttccaggttcaagcaattctctgcctcagcctcccaagtagctgggattacaggcacctgccaccacgcacggctaatttttgtatttttagtagagacggggtttcaccatcttagccaggctggtcttgaactcctgaccttgtgatccaccccacccccaccgtccccttggcctcccaaagtgctgggattacaggtgtaagccaccacgcctggctgagaccagactttttacaaaatcactgttctgtttacaccttgaattagactttaccaagtagctaactactataacttctcttttgaagtattttgtattaaacataggtctcagactttcaagttaggattttttttttttttttttttttgagatggggctttgctcttgttgcccaggctggagtgcaatggtgcgatctcgtctctgcaacctctgcctcccaggttcaagccattctcctgcctcagcctccagagtagctgggattacaggcgtgcgctaccacgtgtgtctgattttgtatttttagtagagacgggattttgccatgatggtctagctagtctcgaactcctgacctcaggtgatctgcccgcctcagcctcccaaagtgctaggattacaggcatgaaccaccgcacccggcaaatgatcatttaagcaaatgatcgaagactcaagacacaaaactacctgaagggagtggctcccacatttgtagggtaccttacagagcaatttcccttcatatgattttgcaggtggtggggaaactctcmgggcagttgtggcctgtgctacatcacccattgaccagaggtgccagtactagtgctcaagatcaatygatcgatcggtctacctacctatcatctattgaccttcagtgctactaaaaacactcggatcttctaacgtctggtccagtctttcaccccatcacagtgagaggctgtgcacaggggtaacacaggcaacggaattatatgaggcaaacacagagatccaggtttctgggagtagcaatgaggttcagccttgcagtcacaaaggcaccactaaaaggcacaagtaatggcaggtaatgaggccttacttggagcagtttagagtacttmccacgtgtggtgacgcatgccacacactcaccaccaccaccactgccacaaatgaagtgcacactccactgctcctgtcctcaggaacctggaagcccccacctggtgtccgaggtgtggctcccactttaagcgtggggcacctcctctccggcctcaaacctacccgagctcccagcaggctgcggcacatctgacggctggaaactagaacccctgggtggggactccttaaggctcctcccggaagcgtagggacctcgctgcccacacgcccctccctttcctcctctggcgtcctggggtctgaggtgggcgtggccagaccagctttaggtccggggagtgtctcgccagcggcagcacacccctgtaagtggtggccagrgctgccgtggcaaaatgagctgtcaactttaggttgacaggggtgtggccgcgaccgcaagggcttttgttgccgggtggacccaacagggatgggctgctggggacagctgctggtgtggttcggagccgcgggtaagtgctatctggcggtcaggggaccgtccagcctgaggcactttcctaggcttgggggtggccggtcaacaggccaggtgtcagtggttcctccagaggcctcgaactctcacagccaaatttctccggtccgtgcttctggagtgcgggccgagaagcgccaagtgcgtgcgaatcccagagtctggatcacgcagcttgggaaggaggaacattctttggggtctcagcaccgccttggggcggggccaccaatctaagttgaggaaagcattggggaggctgcaggaccaaattcattgcggcccctaagttattcactgggaaaggcgctcgaggagagaaactggcagacctatcagcgcgcacccgcggggcttctgcgaccggagtcgggtagtggcttccaggctgagagcgcggctgggccgggtgacgggtgtggccgcgaccgcaagggcagctgttgcggggttctctctttctttcatatcctatttccacccgccttaacgtcctgcgccttctcccaacacctttcaggcgccattctctgctctagcccggggtcccaggagacttttctgcggtcctcgcccctgccgctggcaagtcccagcccccrggacccgaaagtcagcgccccgcctagtatcttggagccagcctccccgctgaattctccgggtgagctttagacgcctccttcctctttcgctcaccataccagacccctctggcccagcyaggggctcgacgacccttgcctcgctccttgctctcaggcaccgaggggtcttggctgttttctacctgcggggccagcggccggcatgggcccacacagacacaatgtgacggggcgtacgcggggaccagcgtggtggtgaccgtgggggccgccgggcagctgagaggcgtgcagctgtggcgcgtgccgggccctggccagtatctgtaagtgcacggcggaggtagggtggacagtgacctgctagttggaggtttcaccctcagggtaacgaagtccacgtgcgcaccgacttgcgtcttggactattccgsggggaggtccaccttgagtgcccttcaaggtggcagtagtcgccaccgagttagccsttacccggaacctcttacaccgagcggaaggcccccaaccagggcrgcgccaaggggtgcttgagcctccccacatttccacgaaccctcctgaaataagtgtaatatctgatttttcggtgtgcaaacctacccttcccatcccgtcagagtcgattgcagcctccaagtccctcagataaaaaataattctggagcctcctctgtcgccaacttctgcccggagcggccggcctgagcaccgaaggccggggactcaccgtccgttccccgcaggatctcagcctacggagccgcgggcggcaaaggcgccaagaaccacctgtcgcgggcgcatggcgtcttcgtctcagcaatcttctccctcggtctcggggagtcgctgtacatcctggtggggcagcagggagaggacgcctgtcccggagtgagcgcagccagtggggatgggscggcgccggcgccgggggcgagggctgcctgggggccgggggagcgtgctttcctcggtgccgggtcaccagcacagcgaggggaggctcccgggccccgccgattccctcccccgctgcccgcagggtagcccggagagccagctcgtctgcctcggggagtctcgagccgttgaagagcacgcggcgatggatgggagcgaaggggtcccggggtcgcggcgctgggcgggaggtggcgggggtggcgggggcgccacctacgttttccgggtacgtgctcccttcggcgctcagcgttggggtcccaatcctctccccaggggcgctcacgcaccggctctccgtccgtcccttggggtccccctatccyygcgctgggctgggctggcctgggctgggctgggggcccctgcccttatccaggccccctgggcgggagccctctcccagtggcagtgcccctggacagctggagggcgcttcctggamcacgccgctggccccacaggtgcgcgctggcgagctggaacygttgctggtggcggccggaggcggcggtcgggcctacctgaggccgcrggaccgaggccggactcaggcctcccccgagaaactggagaaccgctcggaggcgcccgggagcggcgggagaggcggggcggcaggtgagggcgcgggccgcggggagaggcgggcgtgctccccgtgtggctgccaaccttcctgctgtcgctctgcaggtggtgggggcggctggacgtcgcgggctccctctccgcaggccggccgctcactgcaggagggggcggagggcggccagggctgctccgaggcttgggcgacccttggctgggccgcggccggcggcttcgggggcggcggcggggcctgcactgcgggcggaggcggcggcggctacaggggtaggtgcaccgttggagagggcagctgagcaggcccgagggtgaggtgatgttagaacctaagtacaggccggagccctcgggaggataggtgtgggagaggcattaagccctgctcagcagctccaaacaaaaagcaggagctcttagaaaaggaggtcaaatacactgcaaatcagcatgcagacaggactccctagatttccgtttaatccaggatctttcccatcacagcaggtccctgccttgttctgcagcagtcttcagaacttagagctggccgagtgagcaagctgagcaaaggggcagaaaggcaggattgggttaagtcagtggttctcaaagtgtggtccaggaacaggtaatatccccacaacctaagttgttcgaaatgcacattatcagctgggcctggtggctcacgcctgtaattctagcactctgggaggccaaggcaggtggatcacctgaggtcaccagttcgagaccagtctggccaacctgtgaaaccctgtctgtactaaaaatacaaaaattagccgggcgtggtggcgggagcctgtaatcccagctactctggaggctgaggcaggagaattgcttgwacctgggaggcggaggttgcagtgagccgagatcactccattgcacttcagcctgggcgacgagggaaattctgtctcaaagattaaaaaaaaaacaatggaaattatcctgggagttgggggaaggttggggagatgctggtcaaaacaatgcaaaatggcagttaaataggaggaataccttccagaatctactgtactacatggtgactgtagttaatgacgatgtattcttgaaaatygctaagagaggcggggcgcggtggctcacgcctgtaatctcaacactttgggcggcggaggcgggtggatcttgaggtcaggagtttgaggccagcctggccaatatggtgaaacccccatctgtactaaaaatacaaaaattagccgggcgtggtggcatatgcctgtagtcccagctactcgggaagctgagacaggaaaatcgcttgaacccgggaggcggaggttgcagtgagccaagatcgtgccactgcactccagcctgggtgacagagcaagactctgtctcaaaaaaaaagaaaagaaaattggtaagagcgtagattataggtgttcttaccacagaaaataagcatgtgaggtggtgtatatattggtttgcattagccattgcacagtgtgtacatatttcaaaacatcatgctgtatacaataaatatatgaattttttttttagatggagtctggctctgttgcccaggctggagtgcagtagtacaaatctcagctcactgcaacctccgcctcccgggttcaagcaattctcctgcctcagcctcctgagtagctgggattataggcatgcgccaccatgcccggctaatttttgtatttttagtagagatggggtttcaccatgttggtcaggctagtctcggactcctgacctcgtaatccgcccatgtcggcctcccaaagtgctgggattacaggcgtgagccaccacacctggccctgaatttttatttttaattaaaaattaatttttaaaaagaaatgcgaattctcagcccttctctaacatactgaatcagaaactgtaagggagagtcccagtcatctgtgttttgatcaaataactagtgtaaatgcctttgtgcctgtctgggctgtactgctcatacatacacacatgatctacattctcacagaaagggactgtgaggacatgggacaggaggggctcaggcaggcaggaggcatcccagccagcctcagmgaggccttcargctccagctgattaccccctcctcacctccttcactcccacttgtgaacagacagcatttgcatcatgatgctggagaagagagggccacactgggatttccaccgggagattccagcttctcccccatcccccatttttgtagtcaaactctccatcactctccacttccagggggcgacgcttcagagactgacaacctctgggctgatggggaagatggagtatccttcatacaccccagcagcgagctcttcctgcagcctctggcaggtattggccccaaccccacctctgagcctggcctggacttcttccgcagtccctgagcccactcctgcactgcactgaagagccacctgcactgtgaataaccttgcatagcacaggattcttgcatagcatagggtcatttgaaaartgggctgtcatcatgccattgcactccagcctgggcgacaagagcaaaactctgtcttaaaaaaaaggaaagtgggctgccagtcgtgctggatggcaatgcagggcatgctgcgtgcttttcaagtacccccttgctatgaattcgcttcaaatacctgggagtgtgcaggcttgacagaagtcccccagcttctctcaccacccttgtaagcttggtgctgctctttgctctaaagtcctgggctagaattaaccatgtggctggaaaaggcatgtatttatttatttatttatttatttatttatttatttatttttatttttgagacagagtctcgctctgtcacccaggctggagtgcagtggtgcgatcttgggtcactgcaacctccgcctcccgggttcaagtgattctgcagcctcagtcgctggagtagctgggattgcaggcgtgcgccaccacacccggctaatttkgtatttttagtagaggcggggttggccaggctggtcttgaacttctgacctccggtgatccgctcaccacggcctcccaaagtgcaatgattataggcgtgtgccactgtacccagccaaaggcatgtatttactatatcccagccctaccacaccatatcatatcagttcttttactcacagtcaccgagaaccacggagaggtagagatccgaaggcacctcaactgcagtcactgccctttgagagactgccaatggcaggcagagctccagctggctgaatgcctgtgcccagaaggcatggagctagctgtggataacgtcacctgcatgggtatgtcctacctttgcccaaggtctggactcctggggtcacagactgggaggagcagtaggccactgggaaagatggtatagagatttgctgtgtgccaggccctgtggtgggtgctgggcaggggattggagattcatcggtgcacagtgcctttcagaggcctgtcgtccagtgtgggaggatgtttagatatagctatgtaaatgtatatctcaagtgacgattgttgtgggaggtataaagtgctttaggggtgttcaagagggagaggttgcttttgcccaggataatgggggaaggcatcatggaaaaattaacacttgagctgagtcttgaagcgtgggtaaaacttgagggtaaaggaacagagaagaccttcccactggaggtgtctctctttctccctagacctgcacaagcccccaggccctctggttctgatggtggctgtggtggcaacctcaacactgagcctccttatggtgtgtggggtcctgattctgggtacgaagcgtctagcaggcacagttgattcaaggctgctcctctccartgagctgggatgggtttctgcggggtcccggggctgacttcaagaccactcaccgcagcagagccgtggtagactcctctgggattctaagataggaaggagctggggaggcctggggaaaacgtttaccttaatgagcatctggaggggtgtcctgggcaggtgggggagggagagttgatgggcaggtggagggtgtgccgttattcttcccacccccagtgaagcagaagaagtggcagggcctgcaggagatgaggctgccgagccctgagcttgagctgagcaagcttcgaacctctgccatcaggacagcccccaatccctattattgccaggtggggcttggcccggcccagtcctggcctctgccaccaggtgtcaccgaggtttccccagccaatgttactctgctcaggtaagtcttctgcctccttctgagaacctatgcactctgaatccccacctctgattctctccctgctgtagtgaattataagtcccagaaaaaatctggcccacatcccttgtgtaagggagagggaggccctgagaagctccagaaggggaagtaacttgctcaatgtcacctctccgtcccagttcttagaatatgatctctcagctgggcrtggtggctcacacctgtaatcccagaactttgggaggtcgaggcaggcaggtcacctgaggtcgggagttcgagaccagcctgaccaacatggagaaaccccatctctactaaaaatacaaaattagctgggcatggtggcgcatgcctgtaatcccagctacgtgggaggctgaggcagaagaatcacttgaacctgggaggcggaggttgtggtgagccgagattgcgccattgcactccagccagggcgacagagtgagactctgtctcaataaaaaaaraatatgatctggcgcctgtaatctcagcactttsggaggccaaggcaggtggatcacctgaggtcaggggttcgagaccagcctggccaacatggtgaaaccctgtgtctactaaaaacacaaaaaatagctgggcgttgtggcgcttgcctgtagtcccagctactcgggagactgaggcrggagaatcacttgaacccgagaggcagaggttgcagtgagccgagatcgcgctattgcactccagcctgcatgacagagtgagacttcgtttaaaaaagaaaaaaaatcatgactcttggagcccaggrattgcctcccgcccagggcgtctgcagggaccagggaagtcctcatcatgcactcccaccttgactctggcccgcatctgccctcttttttgccctggctctatgccagtgagcaccacccttgcagggcttctacctggggacatgccatggtatggagagagtctatatagggtcagctgggcatatggcaggggcaggggaggtaaagggggtactagactctctaggactcttctccaggccgcctgcccactcccttccaacrtgtcttcctgcagagccctgggccatggtgcctttggggaggtgtatgagggactggtaattggccttcctgggractccagtcccctgcaggtagctatcaaggtgagaggagtgggacttctggctgggggtaggagagcggaacaccctgaagggaaggacaatgactagagctagggttaaccccctctcctgaagcgtgcagggcagctcagaaactgtgcccttttcctccccagaccctgccagaactctgctcgcctcaggatgagctggatttcctcatggaggccctcatcatcaggtgcacctgggaccaggggcagggctggaaggcgggaggggaatgcccgggaacagtttctcttcaccctgaggctgaggtagcaagtcaggggacacagagggcctctccagctttgtggagcctaaaacatggtttccgtctccctcctggtaacgggatatgtcccccaccycactcagcaagtttcgccatcagaacattgtgcggtgtgtggggctcagcctcagggccacccctcgcctcattctgctggaactgatgtctggaggggacatgaagagtttcctgaggcacagtcggccacacctggtgagacccttgtcttagccccccccaggcccctctaaagaccctgtccatgtgtctgagacctacatggactgatgccccctctgcctgacccagggccagccatcacctctggtcatgcgggacctgctgcaactggcccaggacatagcccagggctgccactacctggaggaaaatcacttcatccacaggttaggagcagtcctggctcaggggacccccatcccaactccctccccaaggaacagcccttccacacagcttttaaggaaatagatcaggaagagcaagaacttctagrttctggcagtgattttttttgcctactctgtagggatattgccgcccggaactgcctgctgagctgcgctggacccagccgagtggccaagattggggactttgggatggcacgagatatctaccggtgcgggacttgggaggtgggaaggctcttgctccaagggggttttccccgcaccttggtggtgaacaactcatcattcacctcctccctcctgtagggccagttattaccgcaggggggaccgggccttgctcccagtcaagtggatgcccccagaggccttcctggagggcatcttcacatccaagacagattcctrgtgataacacccttcccctccccttccccactgttcccctcccctgaggctaatcctgtcctttccagcmacctcatgtgaggggaggctacacctgacgggcctcacttggttcccccacttgtgatgcaggtcttttggggtgctgctctgggagatcttctcactgggctacatgccctatcctgggcgcaccaaccaggaggtgctggacttcgtcgttggaggaggccggatggaccctcctaggggctgcccagggcctgtgtgagttgagtgctgcccgggaagggaggtccttcacaaccatgggtgggcatgaactcctgcctctccccaggtaccgcatcatgacccagtgttggcagcacgagcctgagctccgccctagctttgccagcatcttggagcgtctgcagtactgcactcaggtgtgcccccgacctaatctaacatcctggtcttgtgggtcwggagggagggccagaaaactctatgcccccctgctccctgactcttccattacaggacccggatgtgctgaattcactcctgccaatggagctggggcccaccccagaggaggaagggacttctgggctggggaacagatctttggagtgcctaagacccccacagccccaggaactgagtccagagaagttgaaaagctggggaggtagccctcttggcccctggctgtcctctggcctcaagcccctcaaatccaggggcctccaacctcagaacctttggaatcccacttatcgctcctgagccccaaggggccctgagggtaaggactgaggcactgagggtccctccctatactcctcaggctcctgggtggcctgttatgccagcggcctctgttccctgcagtctgtgctgtgtgtctgggcctgtctcggggctggcctggcagcgctgcacttgccatgctggaaaccagcccaggcctcccagggaagggcccagccacttccagcttttgatcttggggccagaggccgccttacacacaccccaggtgtccatggggagcactggattgctctcccattatgagcrtccttcatctgggcagaccccccaccctgcagatgcttctaataaaaagctcttctcatcctccagcgatctgtggatgccagggaccggaactgaggaagagggggccggaggagggaggggctgaggcctgaggcacaggaagctgcatcttgtctttgagttttattaggaaggggagtccgtcgtggtgtgagacgttagaccggaaggtctgggcttgctaaataaaatccgcggtctggcacctctggagagggcagagcctcctcagaagagctggcctgaggaagaagccctttgccccctccccttctataagttagtgtcatttggctctgggaacgctggggcccgggtgggcaaaacccctggcatcggcggtgcccccccttagtggctggcacctggtcctgcaggacccggtgaactgccctgcaccgcggggctccagtctcaagccggcatgcacagtggggacaaagctgcaggtccacatgtcaggtgagcggcccgcggggacaggagtccagcctcatctctcagccaggctggccaggatgccaatgagattgtccagccccagcaaatagccgtcctcgcggttgccctcctcccagggccgccggtggtccaggatctggccatcggggaggggcgtggtcttgccgaagtcgatgagccacacgccggcgcgatggcagtgatcgtgcacaaagaggagcgagctgccgatcacctgcgagccccgcaccgtcaggccgcggccctgcccagagacgcccttgccgggttcccgccctagccctcgcggcccgggcacccgggcagccgccgcttacctcgtgcctcctgaagaactcggatacctccagggtgtcccggatctgctgcaggcggttcagataccgcctctgcagagggtggggtgggagaggagggcaaattaactaaacgccaaatgagcccctgctaacgatgaggagccgggacccacgctgtgcttggcaaatgccgccaggaggaggacccagggccccgcccagcgtggcccagaagggaaggagcgtagagcagttgcgagccagcgcggtgagggccatggtggggacacagccgagggcactgggccagatgacaggggcagtcctcggcttcaggctccccaacacctcagggtttgggatcccgctctcaccagcacttcctcatctccttgcacaaactcttcaaagacgcgaagcacctgctctcggcttcgcgtagtcttgaagtcggtgctgcaggagccgtccgctttctggatgtgggacaggagtgtcaggggccccgggcccgccagtggggaagaggacagcgtagagcagcggtacctcccagttgcaggggacggcgaggcggtgggagagggcggaggggcaggcggggcgggagcgggggatcgggaaagacagcgcgcagtggggctgcggcggtgccagcgaagcgcgcctgcctcaccttgatgccctcgatgcggaagccgagggtggtgctggagctgatgccttcccgccactgcatgtagcgcggcttggtgacggcgcgctgcgcgtgctcctcctccgtgggagcttcaggatccaccgccagcattttcttgtacatgtccttccgcagcttgggccgctcacgggccttggtcagctcctcctctaggtaagtcctgtgggggcgcaggcagcggccagggcatgagggggcgcacacggagaccccttcgagcactcgccccgggtccccctcaagcagctgtcccggccccggacccctacttgatccccccaaccgacctggcagggcacgcatacctgacgcccattttgcagtcgagcacacaaggtccgtcgaagccatcgagcaggtcctgcagctgcaggtagctttcgccgtcgcgctccaccacgccgtggaaggcaggcacgcagccgcgcagcgcgtcagccatcagccgcgccaggcagtagcgctccggctccgagcagcgcttcaggatcagcccgctggtgcccgccgccttaaaactccctgaggaccggcatccgtcagcgccgcccagccccttcccgtcgcgggcacccgcccacccgccccactgctcaccagtgtgccctgccagctgcacccaggcgtagcgcttcttgaaagggcttatgaccggcagattgaccatggtccggatcttctgccagtggtttttctgaaagcgacagggtcaaggtctgataatcggcgtctcggcaatgcataagccctccctccactgaaacagggtctcgccacgcccccgacccaccggaagcagctggggctggatgagtcattaattcattcattcactctgggaaggtttatttgtgcgcctgwgtggcgggtgctgatacaggcgcagtgaaggtgattccagcgtctccagtgagctgtcaagagcctggacttagcatctgaagcccccggtttgcgctccagctctgccactgaagaacgcgtgggcaggttacgaaaatgctctgtcgaggtttttgaactgttgtgaacatcggaattacctgatggtcacccttgttaaaaattgcagattatcaggcctaccgcagggatgttctaagttggtctagagtagggccatttttttttttttttttttttttttcagatggagtcttgctctgtcacccaggctggagtgcagtggcgcgatctggcctcactgcaacctctacctcccgggttcaggcggttctcttgtttcagcctcccgagtagctgagactacaggtgcacaccactatgcccggctaattttttgtatttttagtagagacagggtttcaccatattggtcaggctggtctccaactcctgatctcaggtgttccacccacctcagcctcccaaactgctgggattacaggtgtgagccaccaggcccggccccccaaatttttattactaccaatgcctcaaaagattccagggcccaagaaacaagcctctgtgcatctgtaagaaaaagatctataaaatgaggaaataactatccttactgggttgctgtgagtagtacataaggcttaagcatgataggcgcccagctcccccatcccattccatggtatgaggcagaagctgaacaaatctcaatcactgattccttcactcaggaccttggttcctctcatttagggagacagacatacacagaaacaaacctgtacacaggcccagggcaggaaggccagcctggcagggcctggagaaagaacagggctggagaaagaaaaggctctccaagcctctcttgctatccctggattctatgcactcattagctggcaaggcccagggcacccttggtttttatctggacctagaaatcttaagccatgaaaataagatgccgggctgggcgaggtggctcatgcctgtaatcccagcactttgggagactgaggtgggcggatcacaaggtcaagagatcaagaccatcctagccaacatggtgaaaccccgtctctactaaaaatacaaaaattagccggacatggtggcatgcgcctgtggtcccagctacttgggaggctgaggcaggagaatcgcttgaatctgggaggtggaggttgcagtgagctgtgatcgagccactgcactctagcctggcagcagagtgagactccgtctcaaaaaaaagaaaaagaaagaaaataaggtgcaaacctgagggcctgtcaacttagacaaacctgggaaggagacgagggttgttttttgttttttgttttttgtttttgtttttttggtgtgccccttatctcttctagcctccagctaatcttgagagcatcccatcctctggacctctcctcttaccacccgcaactyggcagccctgtgtcctctctgaagtacacaggttggctcatgtcaactgtgtctgccgcctccccacagaggcacttgccttttagcacagttacacatgttgtacccccagaggaatacacctccctgacaagagggagttctaagagggagagagagaactgaggaggtggcctaagtagaagagggctgctgaccataaagccctttcccatggggaggagatggaagttatggtagagcactgggtgggaagtcagtagttggttccagtcatggctgtgtcaccttccagctgagtgaacccaaccaagtactgccatctgtgtgggcctgtttcccctgggaggacatagctgctgccgtaacacgaaccatcaaatgctacctgcctattgcatgtcaggcactttctcatcttccatcaggcagcattgctcccactttcctactgaagcccttacatggcacactagggtgtgatcacgtgcccaatccccagggatctgggggtgtagccagaagcagcccactagaagcatgacatcactttcaaaactccttttaaaatctttaaatacacaccaggtttgcattctgctgcataataaatccaagttttattataaaactcaccacctccaaaccctcaagtaaaattccaggaagatgatgtatgtgccatgtatattcagcagcaccatcctgtacccccttctcccacactcagtttgagagccataatgaatgcacatgcatagcaagtgcgtgaagtggtatcattcccattttacagaaggaaatcaaggggagttacatcccctcatgccctgcctccagcctcccaatctctggctgaagctatcagcccatcctccctccccaagttccaactgccccagcaggttccaaagtatccccagcaggatgctaccatcctgcctccctttgggggttaaatgggatgtggcctgagaaagtgctttgtgcgtggtgaagtgatgtgcagcaataaggcagtctgagttttgacttctggggaacactgagacctgcctgggggcccttctctactggatggccacctttgcctttatccaaaagaatgagtttaatggctgtagggacctgctagaagaatttaggggatagtgggaccagaatggacttagtgaagaggaaacttgccttgggttaggcagggtgagggaactgaaccatccttttagaactgtgcagaaacagtgaggagggctggcaggtgggcctggcagaagaggatttgatgtgtgtctaaaaacctgggctactaccatttgattgatggacctgctcccaagcaggggtaaaatggtgtcatcacctactctcttgaccttggttttctgcatctcataagaatcaagagcagcagcaactaaggccagtcctagctagcaggttacaaaatactttttttttttttttttttttgagacaaggtctcactcccattgtccaggctggagtccagtggtgcgatcacagctaactgcatcctggacttccagggttcaggtgatcctcccacctcagcctccagagtagctgggactacagatgtgagtcaccatgcctggttgattttttgtatttttgtatgtatgtatgtacatatttatttgagtggtgcgatctcggctcactgctacctctgtcttccaggtttgagcgattctcctgcctcagtctcctgagtagctgggattataggcgtgcaccaccaacgcctggctaatttttatatttttagtagagacggggtttcatcatgttggccaggctggtctcaaactcctggcctcaagtgatctacctgccatggcctcctaaagtgctgggattgcaagtgtgagccaccgtgacattttttttgtatttttagtagagacaggattttgctatgttgcccaggctggcctcgaactccggggttcaagtgatcctcccgccttggactcccaaagtgctgggattacaagtgtgagccactgctcccagcctacaaaagattttcatacctattatctcatctgagtcctccgtcctaccacctgaggttgctatgacaggatttagcccccctgccagtaatgggtatgg

SEQ ID NO: 8816 - DNA, 14344 bp, Homo sapiens
tgtttctttgagacagagtctctatctgtcacctaggctggagtgcattggcgtgatctcggctcactgcaacctctgcctcccaggttcaagtgttcaatcacattatctttaacataatttgtctagttaactggcttaatgcctgatctttagaaaatgttcctaagatatgtcttggtttaattaatgaactaagacccacagaatggtctcccaatttataatctctctcacaccaatatattattcatattgctgccaataaaaattctaagagactctactctttccttgttcaggaaaccttcgaagtctctcacttgcttaatgtgaaagaccataggcccaaattttctatagattatttcagtaataagtttatagaaatattggcaacagagacaaacaacaatactttacaagtacaaatgtaactattttgctgataaagcagaacagcagttctaatagtgattaggaagtagtaaataccaagtagaaggtacactaataaattaactaggatagagtgtgaataaaagaatgacttggtacaatctgtggattagggatatcttagaatttttcttgcaaattaatacaattttggactggaaagatactaatttactaacgtggacaatcatggttatagagattcaaataagcttttcagagtttgtgtacaaaacaatagaagatgaaatttggtggtaaccattgctcatattattctcttagttttgaacctcccacttcaatttttgtggctcagtttaaatgcttccccttgcataaaacctgtgcttctctggaaggattctggtggcaaggacaccagtgtatgtattacttcagggcaagtgatgattggtttggacacacaatgtcctggattcagggtgttattaggaaggcatttctgtttgtcaaaagttagtcaaatgtaagtatcataatacctgctgaaatgtggacagtgagtaaaaagggagtttattggttaatgaaccacagaagatgtgaggtgaagctggcatcaggtgagactggattcagagactcaaacaatgttattgaggcatggtctatctctcagctctactcgtgagtcaaggatggtgtattagttggttttcacactgctgtaaagaactacctgagtatgggtaatttataaacaaaagaaattttaaatgaacttacagttccacatgtttggggaggactcatgaaacttacaatcatggtggaaggtgaaggggaagcaggcattttcttcacaaggcagcaggagagagacagtgtgagtgggggactgccaagcacttttatttaaatcatcagacctagtgagaactcattatcatgagcacagcatgggcaaaactacctccacgatccaatcttctcccaccatgtccctccctcaactcatggggattacaatttgagatgacatttgggtgggaacacagaaccaaaccatatcattccacctctggctcctccaaaatatcatgttcttttcacatttcaaaaccaatcataccttcccaacagtcacccaaacttaactcatttcagcattaactcaaaagtccaagtctaaagttccatctgagaaaaggcaagtcacttctgcctattagcctagtaaaataaaaaacaagttagttacttccaagatacagtgggggtataggcattgggtaaatggtcctgtttgaaatgggagaaattggccaaaacaaaggggccacaggccccatgtaaatccaaaatctggcaggacactcatgaaatcttaaagctccaaaataatctcctttgattctttgtctcacatccagggcatgctgatgcaagcggtaggcttccatggccttgggtagctccatacttgtggctcttcagggtacagcccctgtggctgctttcacaggctggcgttgaacacttgcaagcttttctaagcacaaggtgcaaactgtcagtggttctaccattctggggtctggaggacagtggccctcttctcacagatccactaggcagtgccccagtggggactctgtgtggagactccaaccccacatttccctgctgcattgccctagtagaggttttctgtgagggctccatgcctgcagaagacttctgcctgaacatccaggtgtttccatacatcttctgaaatctagacagaaactcccaaagctcaactcttgtcttctgtgcatctgcaccctcaacactacttggaagccaccaaggcttggggcttgtgccctctgaagcaatggcctgagctatatacattgcccccttttagccatggctggagccgcagcagctggcacacagggtgccatgttcctgggctgcacagagcagcggggccctgggcctggcccatgataccattttttcctcctaggcttttggacctctgatgggaggggctgccatgaagatcttctgaaatgacctgaagacattttcctcattgttttggctatcaacattcatctcctcattacttatgcaaatttctgcagccagcttgaatttttccccagaaaatgggtttttcttttctaccacatggtcaggctgcacattttccaaacttttatgctccctttcccttttaaacataagttccaatttcagatcatctctttgtgaacacatatgattgtatgttttcagaaaaagccaggtcacttcttgaatgctttggtgcttagaaatttcttaagcaccaaagcattcaagaaatcatgtctcttaagttaaaagttccacagatctctagggcatgggcaaaatgccaccattgtctttgctaaaacatagaaagagtgacctttactcccgtttccaataagttcctcatctccatctaaggacacctctgcatgaacttcattttccatatcactatcagcattttggtcaaaaccattcaacaaaactcaggaagttccaagcttttccacatcttcctgtcttctcctgagccctccaaactcttccagcctctgcccatagttggttccaaagttgcttccacatttttaggaatctttatagcagtatcccactatcctggtaccaattttctgtattagtttgtttttacactgctataaagagctacctgaaaccgggtaacttataaacaaaagaggttcaattgactcacagttctgcatggctcgggaggcctcaggaaacttacaattatggcagaaggcaaaggggaagcaggtaccttcttcacaaggtggcaggagagatagagggtggggaggaactgccaaacacttttaaaccatcagatcttgtgagaacccactcactaaaatgagaacagcatgggggaaaccgctcctatgatccacccacctcccaccaggtccctcccttgacatgtggggattgcaattcaagatgagatttgggtgaggacacagagccaaaccatatcagatagagagtggtgggacagaggaccacttcttttaggcataaagccttgaaattatttcacttttaaactaggagcaagaattcaggaggaagttggctgggcatgatggctcatgcctgtaatcccagcactttgggaggctgaggtgggcagatcatgaggtcaggagattgagaccattctggctaacatggtgaaaccccgtctctactaaaaatacaaaaaattagctgggtgtggtggcgtgtgcctataatcccagctactcagaaggctgaggcaggagaatcacttgaacccaggaggcagaggttgcagtgagctgagattatgtcactgcactccagcctgggcgacagagcgagattccatctcacaaaaaaaaaaaaaaaagaaaagaaaagaaagaattcaggaggaagttataaactgtgttgaatattgccaagaagctgggtaaaataagaacagaaaattcattattagatttaatgagagaggtgtttgtttatgttggcttcactagagtggtgaaggccaatggctgatttccatggattgaggagggaacaggagatggaaaatagaggttgtcaacccacgtaaacttttccttccttcctccctctctccctcccatccttccttttttctcttttctttcttctttctctaaaagattaaatatattatagtatggttttgtggaaatgatcaagtaaagatgaataaattaataatacagaagatagagaggatacctataggagcaaaattccttgcatagtcgacagggtctgggatccactgaagaattgcaagggttggccttagatgtaacacagggagagctcatcccttttaatagaggaagacagaaaggctggtacattgggttgtaggaggatatataaggatatcagttaggtgttaagaacagaaagactgagttaacagtgatttaacaaaagaggagagtatttctcctttaagtaaattttcaggtaggcagcctagagctgatgcagtggctccatacccaattatccaggctccatctatcttgttgccatgccaacctcaacatgcagcttacacttgctggcctgaaagtgaactattccatctcctgctatcatgactgaatactagtcaaagggaaaaagggggaagtgggaggggaaagcacatacctttcttaaagagcacaacctagagatggtccctattctgttcatatctcgttggccttaatttaatcacatcatcactgcaagctacagtgggggctgggaaatttggtgtttgaggggatgaccaagcgcccaactgaaaatgttattcttctcttatgagaagtagagaatggatgttagggaatggctagaagactctactacaaaggatacggtggttcttttctgattgcttctaacttctcaatgaaaggtgagttcatcagctgaatgaaagaataaatgagattttggggacttgaggagcaaggagaaggagtataatagtcattttgaagagtgagttaagtagggaactgtagtaagattgacagacagtgtggagggattacttgaatcttgtgaatagaggaaagagtagaatcagattatcctgactcctgcctgaagctttacatattcagagaaaaatgttggaagaaactttgatataatgctatgtctgtgatcaggcacacattttactggacttttactgtcagggccgtcatttagtgccaagatgtctagagagttcttaataagtgtactcaattggctgagaaaatgtgtccatgcaaaaaaccaaacaccgcatgttctcactcatagatgggaattgaacaatgagaatacttggacacaggaaggggaacatcacactctggggactgttgtggggtggggggaggggggagggatagcattagaagatatacctaatgctaaatgatgagttaatgggtgcagcacaccagcatggcacatgtatacatatgtaactaacctgcacattgtgcacatgtaccctaaaacttaaagtataataataataaaaaaatgtgtccatggctctgggaggagcatgtttgttttcctcatttcccagtctgtaaataagcaaattgaaaggggttagtgataatgtccatctccagaagctgtcagatttcctttgtcaaactctatgatttgggctgaagtaggtgttggagaggcagctaccacrtgcacccagatggccacttgtttaatatgttaccatttcccattattttcgcaggatagatagccaaagtggagccctragagatttcttcatttttcctgtcataaagaattggtaattcagtagtcataggagtttgtaataaataactcacattgatttctctgttctgaaataattttgcttcccctcttcccgaagctstgacacytgccccaacaagcaatgttggaaaattatttacatagtggcgcaaactcccttactgctttggatataaatccaggcaggaggaggtagctytaaggcaagagatctaggacttctagcccctgaactttcagccgaatacatcttttccaaaggagtgaattcaggcccttgtatcactggcagcaggacgtgaccatggagaagctgttgtgtttcttggtcttgaccagcctctctcatgcttttggccagacaggtaagggccaccccaggctatgggagagwtttgatctgaggtatgggggtggggtctaagactgcatgaacagtctcaaaaaaaaaaaaaaaagactgtatgaacagaacagtggagcatccttcatggtgtgtgtgtgtgtgtgtgtgtgtgtgtgtggtgtgtaactggagaaggggtcagtctgtttctcaatcttaaattctatacgtaagtgaggggatagatctgtgtgatctgagaaacctctcacatttgcttgtttttctggctcacagacatgtcgaggaaggcttttgtgtttcccaaagagtcggatacktcctatgtatccctcaaagcaccgttaacgaagcctctcaaagccttcactgtgtgcctccacttctacacggaactgtcctcgacccgtgggtacagtattttctcgtatgccaccaagagacaagacaatgagattctcatattttggtctaaggatataggatacagttttacagtgggtgggtctgaaatattattcgaggttcctgaagtcacagtagctccagtacacatttgtacaagctgggagtccgcctcagggatcgtggagttctgggtagatgggaagcccagggtgaggaagagtctgaagaagggatacactgtgggggcagaagcaagcatcatcttggggcaggagcaggattccttcggtgggaactttgaaggaagccagtccctggtgggagacattggaaatgtgaacatgtgggactttgtgctstcaccagatgagattaacaccatctatcttggcgggcccttcagtcctaatgtcctgaactggcgggcactgaagtatgaagtgcaaggcgaagtgttcaccaaaccccagctgtggccctgaggcccagctgtgggtcctgaaggtacctcccggttttttacaccgcatgggccccacgtctctgtctctggtacctcccgcttttttacactgcatggttcycacgtctctgtctctgggcctttgttcccctatatgcattgcaggcctgctccaccctcctcagcgcctgagaatggaggtaaagtgtctggtctgggagctcgttaactatgmtgggaaayggtccaaaagaatcagaatttgaggtgttttgttttcatttttatttcaagttggacagatcttggagataatttcttacctcacatagatgagaaaactaacacccagaaaggagaaatgatgttataaaaaactcataaggcaagagctgagaaggaagcgctgatcttctatttaattccccacccatgacccccagaaagcaggagggcattgcccacattcacagggctcttcagtmtcagaatcaggacactggccaggtgtctggtttgggtccagagtgctcatcatcatgtcatagaactgctgggcccaggtctcctgaaatgggaagcccagcaataccacgcagtccctccactttctcaaagcacactggaaaggccattagaattgccccagcagagcagatctgctttttttccagagcaaaatgaagcactaggtataaatatgttgttactgccaagaacttaaatgactggtttttgtttgcttgcagtgctttcttaattttatggctcttctgggaaactcctccccttttccacacgaaccttgtggggctgtgaattctttcttcatccccgcattcccaatatacccaggccacaagagtggacgtgaaccacagggtgtcctgtcagaggagcccatctcccatytccccagctccctatytggaggatagttggatagttacgtgttcctagcaggaccaactacagtcttcccaaggattgagttatggactttgggagtgagacatcttyttgctgctggatttccaagctgagaggacgtgaacctgggaccaccagtagccatcttgtttgccacatggagagagactrtgaggacagaagccaaactggaagtggaggagccaagggattgacaaacaacagagccttgaccacgtggagtctctgaatcagccttgtctggaaccagatctacacctggactgcccaggtctataagccaataaagcccctgtttacttgagtgagtccaagctgttttctgatagttgctttagaagttgtgactaacttctctaatgacctttgaaatcaagtccctgtaagtttacacttcccattacacaacatatccatggcactttaacctgtccaagagtcccctgaagggattccctctgacaagcacagtccctcttttgagatagctggccattcatgtagggccagttgtgggggttttagtactctcattctatcattattccaatttgaggagcaaaaactaaagatcattgagatccatggatctgctgccaggttcagtgactggaatgcacttgccccagcgggttcaagttctttgtagaaacagacccctcaaagatgacagcagctggcttcctccagaagtgtccttcaacactgtctttcagtactaagtgaccagtagaagttactccataaagaccatagccaggaatgaattatggggcttcctgcatatcaaatggttacctagggaaggcatatggtaaactagttaagcacagaggttctggaatcagactgcctaggtccaaatcctggctttacaacttactagctatgtgaccttaggtgatataacctctttacgcctcagttttcttacctacaaagcaggagaaataatagtaattagctcaaagggttgctataagaatcaaagaaaatcatgcaagcaaagcacttactacagtgcctggcacatagtaagctcttataacagttttctggtattattcttattaagccattttgtattatatccataaatgtagattcataaaatacataaaaatacaacttggtagaatttgtcttggttggcagcagttgaagcttctcatttgctaagaattaggtttagaatgttagaagggtgaacaacaagtctttgaagccattatttatgaatattgacttctckaattgacttttgataaccatttgtaagcatagaagctaaggatacattctcagacaaaaatgagagtgcaaatactctctgttgtccaattagggcagatccatccatcctcacattcagctragcagaagarargattgacactcttttctagttraataatccagatacgtcttaattatagaaggccatcccaactccccagggatgtaggttgagctaatattttcttcagaattcagttgcttgcatcttactatacrtagtctggtagacagcctctggccttaataatttgagccaggaaaatcttmacagctggtatttgcattcagagaacattaaaaaatcttaacaaagcattcgtaggatgtttagatttaagcaatttagcctactggtgggtacatcaatgtaaacttgttggaaaatgtatttccaggtaactggtgaattgtcataccatatagagctattagatgtaatccaattaaatgttagatgacatctgccaaagaagatgattctgatttgggcatgttggttctaagcaatgcttttttttttttgcagtaagtggagagtaagatcaaacatccaccgtggccacttctagctgatgctaataaaaccatgttgtcaggactggttttctgttagagtagggaccatggatccaatttttccagaagtagaatcaggcctcaaggaatgagttaaaaagacatagggacaaatggtctataaaacctataatagaaaggaggtgaaagcggggtggtggcccagtgcctgaagagatactgtagtgcatttacaggccaaataagagaaagtagaacaatagtatgaatcagagatgatggaggctgctacttgatagaacactttctttttggaactgaaaatagccatgttggtataagggttagggccaggcctgaccctaatgtaagcgccttagcatgggatgtgatatggagatgtgcagatcagaaacctaaaatctccctgtgtcagaaaaaaatgttagctcactggccaggcaacaagacttgcacactttccaaaaagaggtggtcatggagagagcattgttaagaatgggctgcatgtcaggccaggtgagtggatgagaagccacctctgtgatgagacttggtctatccaggccctggaggagagagtacaggctgcctcaaaagtgaggctgggacctgatggaaatggatttggagtcccagctgacaaagtaagtagaatgttaaatctgtgatattctcccccatgctttcactatcctcaagtttgatgtgccccaggcaagcaaagattgacaaaggaagcaaatgactctagatgattgagcaccaccaccacgtagatcaaatttccaaagtatagatttctgatcactagaatcccagggaaaagagaagcactgctttgatttctaggtagcttatcctaggacaactgcccactagtctcagatgggttgtcgtacttgcctggattccttctcttcagctccctgtctctatttcaaatatgcatcttttcatttcctctgcactagaacgtaggttaagcgggcttgttagccttttccttctgaaaatgcagactcctagctcaaatttcctggatcacctggcccagtgatcacttatagtctgctgattacaggcatcattttcctctggggtgtttgagtatagattcattgaccccagtcctcctagagtagattctctggggttagtgctcaggaatatgcaagatcacaagctcttttgtaccatgtgcttttagagctatcactgtagtgttttcctgacagctcagatttcttatctcagggacatgcctggctcccactaagcttgcaggcaggtggtcaccttttttttttttttcccgagacggagtctcgctcttttgcgcaggccaggctgcagtggcgctatctcggctcactgcaagctccgcctcccgggttcaggccattctcctgcctcagcctcctgcgtagttggggactacaggcgcccgccaccgcgcccggctaattttttttgtatttatagtagagataggatttcaccgtgttagccaggatggtctcgttttcctgacctcgtgatctgcccgcctcggcctcccaaagtgctgggattacaggcgtgagccaccaggcccggccaggtggtcacgtttaaagaagcatctagtgcatctgtatgtacccaggtcttccccttagcctacttctggtgcattctttcaggcctcattcagtgtggacccgtctgtcctatgcccttcatacacacagataagtgatctcccaacgtctcatcactgcccccaggatgataattgcttaatcacacagggaagatcacacatagtcttaaaacaaaacaaaaacaaaaacaaaaacttcttacacttactgagctcttaccatgtgccaggtactgttgtgagtcttttacatatatttacttgtttaatgacaatcctatgatttatgtaatattttatagtcctcattttacagatgagaaaactgaggtttggagaggttaattaacttgctcagagctaggatttgaacctaggcagtctggctactcagttctatgcttctaaccactgtattctactgccacattcaacagaagcttacaccctacacttatacccctagtgcaagacggagggtgtggggatgtgtgtgttttttcttatggggaagccattccaggatgccgtatattcagtgttagctaccattgcaggtccactggcaatcaccctactttttattttgttcttatgtgcttagcagaatggcttgcacatagaaatcctattcagccttagcatgaatacaattgtgccatattgtcaaagttcttctctgacctccatctcttctacagtcatgcacacccttagatgtaactttacatcgtagtggcattcaccaaagacatagaatcatacaagggactctaggccagcaattctcaacttcgattatgaatattggaaccacctggagagttttcaaaaatccagttgcttaggccataaccagataattatgttgattatctggcggtgagactcaggcatcattatttttaaacctccttagtgattacaatgtacagccatgtctccaacagccactcttctaggtgccactcttctagggtgagtgatagtttagaaaagattgcagagtcacagctgtggtccctgacagttcatgtggttatttctgatggatatgcccctgtttcttaattttcttatgttatagtagtttccgtttgagtcaggggagcatatcaaactccatttcagcactggagttttaagtcatagctctaggattaaataaagcgacagccctgtatttagtgtgttcttatttattcagtaaagcctcactgtgatgayaaatattgtatttgttttagagtgttctcttttttccccaattaatactttgtatctctgtagtgtggagaaaccaaagtgccaagatatttgaaaagctgaaatccttcagtatttttatcagagcatcacagatataggaggaagagagaagaggcttcccaaacaaacatatctgagggaagggtaaaggttgcattgcaagcttattacacttctctcctgataaagttcactgaatgctctgtgatatgctgcaagcagttatagagctgtactggcgggttgctggagccaggggtgggttgtaaaatggtttgtgggaaggtctttcattctgtctctcgcgcttttctttcttttgctttagctcttgctctctccatctctatttctctctgcctctccctctctttttcaattttaggccttctttacagcatatccattttggaggtagttctataatgtagtgggctccatgaaatcaataaaattaccagtgttcacctattgcattggtagctgcattcttttaacttacctaaggagcccagacagacactaacaagaaggcaatttggcattggaaaaacatcttcttccttctttgtaccaatcttttcacctatatgatttatttttgtttaaattatacatgtaccttttattgggcaaatggttagaatgagagaacaaaagcttttggagcaattactttaagccagtcatataattaaaaaaatagatgcaaaaagtttgtaaaaggatattaaaaattttaaaactatacatcattaaaatacaaaccagtccagaaatgtaccaccatttgtaatagtcctttttctcttgcgcgtttcgaatatgctgcccacatgttagctggttctcctagtcaatggagaaacagcctctattatcaatttctcattggatatcaatgtgaaaactcatgataagatcatgatgaataagctccagattctttttacatgaaatgatgtcttatatgggaattaatatattgtgaaatactttggtacctaaatgtatacatagcttaggatgtccaactgatattgttctgttttaggcattctgggcataaagccaaataaccacagtgagactgggtgtcctattcataaaatgggatcttcattccctcttcccttggttcttaattacacatgcacacacacacacactcacgtaaacacacacacttcattttagaagcaatacaatcccattatgaaaagttagtgaggaaaaaaatcctccataattccattattataataagaacatattgtctggaagcattccttacactttttttctaaaatagtcacttcttttaaaaatagtgtatatacaagtctgttattttttcttttatcaaaagcatttttatttacatgttatagtataaaattcaccactaacatttaaatggctatctattctatttggtggatgtagacatatacagtttacttaaacatgccccatttttctctttgctatcctaagtaattttaagtggttgtctttgtgaaaaaggttcccc

SEQ ID NO: 8817 - DNA, 65385 bp, Homo sapiens
attgggttgttgtctttttttctttgaggttatttcattgtaagaggttagactgtaaggtaatttcatttaaatactaagtatttagtattaactctttatcagtaacataggtctccatttgtcattttccttttgaatttttaaaagtcagtatatatagagaaagtaaaagcatggctcctgagacagactggttctaccatttactagccttggtggatgctatgttaggtgccctgtttggatacgctttactggccagtacacctgtctctccactgttgtgaggttggctgctagagctcacaggtgcctttttctctggagagtctacactagggaaggcagccacacttgggggggtgcagttacgccccactttatcctgatacaaaggtacaaacacctttgtgtaagatggggctaattctgcagtttggtttatgctctagattccagagccctccctcaatagagcagatcaaggctaggatttcctaagatccgtttttcttggttgtttccccttccctatcctgtttcactctctccctatgggttcctcctaaagagccctccctcgataaattacagggtctaaatcccatctcaggattggcttctagggaaaccagcctaagatactgtaaaatggggatgatgttagtacctacttcatagggttgccgtggagattatagttaaaataataataatagcaaaatttagcacttatatgtggtaggccctgttctaaacactttatatgtattaattcatttagtctttacatcagtcaatgtccaggtataatcctcaaacatgaaaaaagtttagactagtgcttggcatatatctagcaccaataaatcttagctattattatttactgatttactctagatttcacatgagagattaggcatgttagtaggctgtttccctgcattttgaagtctccttcccattctctttttcttagctattcctttggaaagctcttactcactcacctactccacactctcattttttccttcttttattcttattttatatatatacatacacctatatatgtgtatatatgtacatacatatatagatacatatgtatgtgtgtatatatatgtacacactttttttttttttgagacaaggccttgctctgttgcccaggctggagtgcagtggcgcaagcacagctcactgcagcattgacctcctgggctcaagtgatcctcccacctcagcctcccaagcagctgggaccacaggtacatgacaccacaccaggctaatttttatttttttgtaaaaacagggtatcactatgttgcccaggctggtctccaactcctgggctcatgcgatcctcccacctcagcctcctgaagtgctgggatcaaaggcatcagccaccgcaccggatctccttttattctaaaaggtggagttatcaagtccacattcttgctgaggaaactacacaaccaatcttctttcttttagtcaagggagcactgttactctgatagattttgttgggggagggaagcaacaaatgttatttacttggttattcaagtttgccttgattcagtgtggtcgtttataattcagggaagtctagccaccctggtttcatcttaaagcaaagtttggcctatcctaacaaccccacatgttgtgaggctatgtacattatcagtgctctccccctactccaacacactggaaaatggtcaaggaagcctgtcagcagtgtgatcaccagggggtttcatctagtactgtggaagtgatgtggtaaaaacttcattgctgtgttcccagcatccagcaaagtgcctggcataaaataggcatttaaacataaatgttatggagcagatcacagtatgtttttaaacagatcccttcctctctctctctctctctgtctttctctctctctgatccaggatccccagcaagactaatgtgcctttttgtttttcatgacattgacatttataaagagtctgggctagttgcagaatgtctcaaattctggatttgttccagagtgcttttttaaaaatataaatcaggaccaggcatggtggctgacacctgtaatcccagaactttgggaggccgaggcaggcggatcacctgatgtcaggagttcaagaccagcctgaccaacatggtgaaaccctgtctactaaaaatacaaaattagctgagtatggtggcacatgcctgtagtcccagctaatcgggtggctgaggcaggagaattgcttgaaccctggaggtagagattgcagtgagctgagattgcaccattgcactccagcctgggcaacaagagcaaaactccatctcaaaaaaaaaaaaagatatatatatatatatatatatatatatatacgtatatatatatacatatatatatatacgtattttatatatatatatatatatatatatatatataaatcagatgaagttattcccatatttaaaaccttccacaggattcctataatatttagaaaataaagtccaaactcactaccctggcttacaaaggtctacattgccttttgtatgttttcttctttctcactgcagccacagtggccttcctccggtttctcaagtccacaaagctctcaaatcctgcaaaatcctcgcaggactttgcactggctgttgccttttcctaatgtgcttttccctgaagtttgcttgaaggctggctccttctcataattcaaatcccagtttgaatgccgttttctcagagaggacttccttatcttagcccccaatctgaagtaaagtagtcacttactcactctcacatcacccttcttgtaactctctgcatggtacctatcataacctgatatttttctttttcttttttctttcttgaagcagggtctggctctgtcacccaggctagagtgcagtggctggatcatagctccctggagacttgaactcttgggcctcagcctcagcctcccgagtagctgagactacaggtgtgtgccaccacaccaggctaataaaaaaaattatttttgtagagatagggtctcactatgttgcccaggctggtctcaaactcctggcctcaagcagccgtcccaccttagcttcccaaagtgctgcaattacaggtgtgagcacacccagtcctgatatttcttgttgtttatttttgttgagctccaagagatcaggggctgtgttctgttgtgctcactactatattccctgtacctagaacagctcctgacacacagcagaagtttaatacatacttgctgaatactgtaatgaataagctgagagctgaggatgaaaagaagccaaccatttaaagagcttggggaaaatctaggcagggaggaggtcctgagagaaccttgaggcttagtccattctagggcatgaagaatgccctgtgtacttggaggaaagtgaggcagcaggaggaaaaaataggagagaagagagaaattggcaggggcaagatggcttaaggccttttcccccacaggaagtttggattttattttaaattaaatgggaaatcactaaaggtttacgagtacgagagtgacataatctgacttatgccatttaaaagatatttttcaatttgagtgattaggaagatggaagtaactaatatcagagatagaaatcacatatgtaagagaagatttgcagggggtaaataattctggacatgttgaatgtaatgttgtacttctggctgggtgagggggctcatgcctataatctcagcactttgggaggccaaggcaggaggatcctttgagcccaggagttcaagaccagcctgggcaacatagtgagaccttttctctactgaaaaaataaaaatagccagacatagtgtcaagctcctgtggtcccagctactggggtgtaggggaggggtgagatcggaggatcacttggccctgggaggttgaggctgctgtgcagtgatctccagcctgggtgacagagggaggtcctgtctctctctctatatatataaaatttcctttgtggctttcacagtatccatactttaaaagaatttataattaagaaggaattaatacctacctctgaaacagtacagccaaccaattccattgttatttacaagaacctgatattaaagatggttgtaacgataataggtatcaagtatggagcagtttctatgtgtcaggccctatgtcaaccacttaacaaccttacctcacagaagcatcatagcaacccttattagaagaggctttattatgttttacaggtggggaaactaagactaaagaagataactcattcaaggtcaatcagcaagtaagtagcagaattggaactcaaacccaggtctagtttgatgataaagctgttcctttaagcaatttgccataacatgcacctaatgggaaatgttgcttggatcactggttatggccatcattcacggagatactgaacccggagttttctttaacatagcctttaccctgtagaaacatttaaacttcatttcagaagagaaatatctatttgaaaaataatctaagtaaattcatcagatgctttaccccagagagactctggtcttggtattttggtttttgttgttgtttgagacggagtctcgctctgtcgccgaggctggagtgcagtggcgcgatctcggctcactgcaacctccgcctcctgggttcaagcaattctcctgcctcagcctcccgaatagctgggattgcaggcgcccaccaccaggcacggctaatttttgtatttttagtagagacggggtttcaccattttgaccaggctggtctccaactcaggtgatccccccgcctcggcctcccaaagttgctggtattacagatgtgaaccaccgcgcccggccggtattttgtgaagaacaaactataaggtgactactattttggggtcaccttgacatggaggagaggtgaatggaaataaaacttattcttcccagtgtctttagaatgtaggcgctgaaactgagtgaaactgagtaaaactgccacccaattttcctgggaaccagcgattctgtagtcaacagaagtttgcttttccaacagctggaaacgccagggttgggcacagcctcaagaactgaggctgccttgttcagactttcacacggtccctctgttccttccacagaggcctctttttcttctatatcccgcatctgccgcttgggacactcattctgtagcgcagcaccaagtcttccaaaaaggcggcgctggttttgcgctccttttttaaagggatctaggccagcctctatctgaactctgtacgatgttttttgtttgtttgttttgttttgtttttgagatggaatttcgctcttgttgcccaggctggagtgcaatggtgcgatctccactcacggcaacctccgcctcccggattcaagcgattctcctgcctcagcctcctgagtagctgggattaaaggcatgcgccaccactcccagctaattttgtatttttagtagagacggggtttctccatgttggtcaggctggtctcgaactcccgacctcaggtgatccgcccgcctcggcctcccaaagtgctgggattatagccgtccgtcacagcgcccggccaactctagacaatatttattgctctactttttagtgtctgaagaagaaagaagaggacaggaaagaaacttcagtctgagggttgaggacacgtcccggagcagaggaggaccaagctcccaagccccctgtcaccttgacacgcagacggttccccaggactgcgaagaggggggcaaccagcgccccgccccgccccgctgcgccgcccgccattggccggtccgaaagacgcggggcgttgtcggtttgaatgagagcgcctggagccggggcgcaggcgcagaggagggcggtgttgagaccggcggagcggcgggacccctaggtggcggagggacgctccgggaaagcgaggggcgctacgagctctggcccacgtgacctgccgggggcgggagcagggggcgcgccggcctcctgcggtgcccctgccttggggaggggccgtgaccacccgtctgtcgcccgaggcggccgccgctgcaccttcaccgcgtacccgggacccgcccgyccgcgggaggtgagcgcttccgcgacgcgggttctgaggcgtttgaggggctctcggagggaggtgacagggaggggtgcgtgtgcgtgcgtgtggggcttctgtgtccagaggtctgggggtgacgtcctttgttttgggcaggaggcgggctgggggcttgcgggacctgtgggcgctgcggggacgcggcgtcgatgctcaagaaaccagaaactcggcttgaggagttgctgcttttttgtcggaaggtcttcaaatgagagtaaagcgttaagagcctcactcctgagtcttttttttttttaagataaaaactatactagagtccagcgacttcttaccactctgaatgtgagtaacaaattgtgaatcaaagcccgaatccccgtggaattcattccgaggctgattgcaatcacttggagtcgggcgcgtcctacctaaaccaggcagtttatggcaaatacctgccttgaccgtgcttaaattagtgaacttttgggcaccaactggtcgatttaccatagaaattggtagttgctgcaaaaagagtaagtaaacataaaacgttaagaaaactctttcctgaaatctatagaataccttcgaataaaaaaaaatctgtaatttccttgttttaatagtaaccagttagagcatttgaactagtagcatttgaactctgttaaagaaaacgagtaaggatggaaattttattggccttaatgcataatttaaccacaccgtagaattaaacgaagtaggttcttggctttcctttctatcgggtttgcattggagcgttcgtggggtgtgttggaagtcagcaggaccaacagagctgagttttcaagctgccactttagaagggtgtaccgaagatttctggcctgataatagccggtgtgattgcttctgataaataccacttttgattgggttctcactattcaggagcagctttagttgattgtttagaagtgaataaacaacattaaaaagggtagatcactgttggttgacatggtgtgtgtaaggagaggggggcctcagggattaggggtggtctcacacctacttctctttacaactaccacggagtcgttttcgcaagctatttcccaggctattacttataatttaagtattggagcggtttcaaagtaaaaagttgtgtgatgttgttgtagaggcatgtctccaaaatcctctctggccagataagcagtttaattgtattttcttacattcttaaatcagatattcggtgttacaaacatattttaatatagatctgagacttgcttactagactaattaaaacagtgataagatatagtagttttaaaaatgaccttttcataaacataaaatatttctaagatctatctttagaaatttgtaattagttctctggaattttaaaatggaaaatctgacatagatttaggttattctaaatttatttgaatatatattaaatatgtctattttataataacagttactgttattactacagcactatgttgagtacttttgttatgtatcagagccaggtgctgggtcaggtgctttataaatcatgtctgtaattatcacagcacattttaggtaagtgtcattatgcccacaccaactgagagtttagcgtaagatcatataactaataagtcactgtgccgagattcaaatcatggcctgatcccaaagcacatgctgtattgcttctgtgtgtctgtttaaatctctgctgtgtctctggattccatttgtagggacaagttctactttaaagatgcctttaggtgctgtgttttgttgtagcttcgcagaaatatttcaatctttctgttggaactatcttgcttcattattttataaatcatcttataaatcacattatattttcaatatcttcttaatcatctttatacaaaacataagtgaagagtaagacttttctgagtttcttacataaatatgaatagaatctttactgtggagaagaaatgtattacagtccggttttctcactattgtaggattctttggcctcgtcataattcctgtcttcttcccagrgaagaaattaaagtttgttgggcctctcttatgtgcaaagcaatgtcgttggtgttgtgagatgacaagaaaatgcttcctattcagtagttgtttctggagtttttgtagtatttttcttttctccccattcctgccttatatgttgctgctggtttatcttcctagcagagatccaacttggctattcctttgtggggaaaaaataccagcaaggttccccattgtgtaaataaaaggctgaggccgggtacggtggctcacgcctgtaatcccagcactttgggaggcygaggtgggcggatcacgaggtcaggagttcaacaccagcctgaccaacgtggtgaaaccccgtctgtactaaaaatacaatagttagcccagtgtggtggcacacgcctgtaatccaagctactcaggaggctgaggcagggaggcggaggttgcagtgagccgagatcgcgccactgcactccagcccgggtgacagatcaagactccatctcaaaaaaaaagggggggctgaatatgaatatatgcttctgccacatgttcagagtccctcacagtttgttactgttctaccttctcagccttctctttcactactctgaatactgtgtgcttatcctggaacacattctgtgcatttctaccctccctttttcttgagccattcttttcccttgactggaatgcctttccttcatttggctaataagatctacccatccttcaaggtgctgtacaaaattccttgcttccaaaaagttttccctggtccttttcagttagaattattattcccatattatcacaaaacattattgaatagaaacatttattttcccacagaatggtgataacttttgggaagagaagacaaaatcatgtttaatatattttcctatggagaattctaaactcaaactctctagggaccctttctaagcatttataatatttctgcatttgggatttatttctgctttaaaatgtgtttgggtcaggtgcagtggctcacacctgtaatcccagcactttgaggggcccaggtgggcggatcacttgagaccaggagtcgagaccagcctgcccaacatggcgaaaccctgtctctgataaaaatacaaaaattagccaggcgtggtgctgggcacctgtgggaggctgagagaggagaatcacttgaacccaggacgtggaggttacagtgagccaagatggcgccactgcactccagcctgggcgacagagtgagactccgtctcaaaaaaaaaaaaaacaatgcttagtggaaaggaccatttcttttctatttcactattgagctttaaaattatgtatatgtattaattgattgaagctgatgactggaccatcgttggtaataataaatggctatgcttaccaaaaaggtttatatatagttcagatgatctaacctggtggcaagaaaagtaaattatatttattgtctgatgaatgttaccagtttgtgtagatccatggatggaagaaacagaccaaaaacaaacaaagaaacagaccaaaagttattggcatttaagtggcagtcaggatcagatagtttagataaattcgaagaagcacaaaatgtaacctggtttgcaaactttttactgccagtggagtaaagcagggctaggatttctttgataaagagctagcctttcttgtctgctctgattgcataccttggacagtgcctggaagtccacctagctgtctaaagggagtctgtctattttgacttcctaatcagataattaaatgtgaggcagttagagttatgtactagttgatctttctatatgtctctgtcaattcccgggatatggaaaaaatgattgccttttctttatggttagatgccgtgatctagcaattttgttaattttgaggtttttggagcattgcttggaagatgctattaagagacagatttgttccttgcagattgttagttgtaaatagtagtggaggttggaggttgaacttgatgacttctcaatatcctttcaaacctacaaattattttccagttcttcgtcctgtgattaaattttcttatcctaatgatcaaatttgtaatttaatatttgttgcaaattttactagtcttacactatatacacacacattgtatctaggaagtaggtttgttaactccatgtaatgaggaacatgagtgaacacattattgctaaattggctagagagttcttaaaacatgaatcatgaatcaagaattgcttgtttgttcagtgaatatttttttgtgtgaagtgctacctaattgttatggagattgtaatgtaagaggcacttttaaagatattcttcccttgagaatagtaagactatattataaattgctcttattgaaatagtgaatagcattctgtcttcttgcttattttaatggtcttagaaatggttctttctacatgcagttttcatcaagtaaaatattttgcaactttatttatattcatttacttattcgttaatttgtgaaacatgtaaatgctacatgtttacatcttaaggagtatgaaattaacattttataattgcaaaatttagaatttcattaagaactcatggatgagaacaatattttgttttatttttttagagacagggtctcactctgtggcccagactggagtgcagtggtgcaatcatcgattactataacctccaactcctgggctcaagcaatcctcctgcctcatcctcccaagtagctggggctatagtcacaggccaccacacctggctgatttttcaattttttgtagaaacggggtcttgtacgttgcctgggctggtcttgaactgttggtctcaagtgatccttccaccttggtctcccaaagcactgggattacagatgtcagccaccgggcctacctaagaaaaatatttaaatttaatatcagtatctgtggggaattggttccaggaccccctgaggataccaaaatccatggatgctcaagttccttatataacatggtatagtatttgcatataacctatacgcatcttcccacaaacttttaatcctctctagattatttatgatacctaatacgatgtaaatgctatgtaaatagttgttatatggtattgtttagggaacaatgccaaggaaaaaagtctacatgttcagtagagacacaacttttcattttctttcctgaatatttttgatacgcggttggttgaatccactatgcagaacccacagatctggaggacctactataatttaatttaattctaaggtaagttaattctaatacctctctttctgctccattttataaataacagcccaaacctcatagtggataacgggagataatatcattgccagtttagctgtttgtgtaatctagacgcctttggagctattgcaatgagtatccacactaattccctttattaatttttttattaaggaaaaaagaggcacagtggaattctgaacaaaaggaaaagagatttgatgtgttgatagctgctatttgatgtgttgatagctgctacctttttgttctttcttaaaatactgctccctagcccgtgctgtggcatgcacctgtagtcccagctacttgggaggttgaagcgagaggatcaccaagagttccaggctgcagtgtgctatgattgtgatgtgaatagccactgtactccaacctgggcaacatagcaagatcccatctctaaaaaaacaaaacaacaacaaaagatagtgcttcctttgttggccaagggaagagataagaggagtactattttgtgtttcttgcaggctaaacttgttattaatgtgaaaacctcatttcctcttggaaacttcatcagtattcccaaggctgtttctttctaccttccctcctttcaccttctgctctgttccctattaacttctagctgtacttaattaacagagcagtgagtattcattagtctggtttatgatatagctgaaatacttaaaaggatgttatatagaagaggaattaggctttattgtatatggcagcagaaggaagaagtagaacaaatgggtagaaatggaagaattgctcaaagtatggaacgattttcttacaggaatattcaaaattaagattagctgctttatgacctatgtaggaatgctatagtaagatagtggactaactgacctctaggattgtttataacactgagattccaggactttatgattgtatatctaccaatttatctcatatatgtatatgtatatccttctttgtctttctcaactgttatctcagaggttatagtttatrtctgatatgctgtagctctctctaatgtatcggtatggattcatttttatttaaatattctcagtctttatcactgaagattttacctttattcctctctttttctttctcaccctcctattagatatattatagagctgctcattttgtcctccttttctctgaacttctctttattatttttcatctgcttattctttctttagctgcttaactagtacattgagggtttgttgttgttgttgttgttgttttggtgggggcagacagagttgcactgtgtcgcctgggctggagcgcagtggcataatcttggctcactgcaacctccgcctcccgggttcaggctcactgcaacctccacctcccgggttcaagtgattctcatgcctcagcctcctgagtagctgggattacaggcttgcatcaccacacctggctaacttttgtatttttagtagagacagggtttcaccgtgttggctaggctggtcttgaactcctggcctcaagtgatcacctgtgtctgcctcccaaagtgctgggattacaggcatgagccattgcacctggccctaactagtacattgagttattaatatcagtgttcatggtagttttttgtttcattttgttttggggcagggtcttgctctgtcaaccaggctggagtgcagtggcatgaatattaatactgttagtaacagcaatccaaaaaactataatccaaatgtccatcaacagcagaatgaaaaatacatttggtatacaatggaatatacatgcaagttgtagctatgcacaacaattgagaaaaatctcagaaacaacgttcagcaaaatcatataaaactaaatggtatcttatttaggactatactgacattcgtgttaaagttgtaaagacaagcaaaggaataaggaacaaaatacagtttagaaatcaccttagagggaaaaggaaggagatgggttaggttggactacccaggagactttaaaggcaggtaatgttcttattttagactgaatggtgttatataaatgtttgttgtgtcattctttttaccatatacatatttcccaaatgtcttttgtacctacccaatattaataaaaaacattttaaagaccttaaagagtttaagtagaatatattttgaaagcaaatgaatccaactataaccgaagtatcagtgtgatatcttctttgaagaaataaatttactgagtttggagttgactatttcaaataattattgaattttcatttgatttgttaatagtagtttttaaaagtttgaagcagcaattttgtttttagatgctaatatgatacatactgttcttttttgtttatagcagaaaatattacataaaagtattaaatttcaaacatattttaaaaattacagttctcaaatctcatstattcccacccctatttagaagctccatgatgacagttaagccctgtgctatcttctgtattgattgacatgacagcagtctgcagagttagcttgtgattatgtacagctcagggttactgtaggttgttctttgaaaataggacttcaagcaaagcatcttgtattccttttgcagaaatgttgctgaagtgctgctgaaagggccagagatgcaaggatttgggatacattttgaacctttaagctgtctgacattgacctcctttcattattaataaagaagaatcaggagcttaggatgtattaacaccaactcattaatatactaaccggacaatgttctacaaacaattctacattgtaaaggactggattggcacaaaataaaataattttattttattcagcttataatatgactcgatggaggaaaatttgataagcatgagagaagaccattcttttcatgttcgttacaggtaagactattgctgtcttaatggatgacttttaatccttattttaaartgtttttaactctgatgaccatttcaagtttcagttgaaaatactcaaatataccagccatagtattgtctgtagacaatattttctttttgttgtaagttttcctttctgtaagaaaatgatagtagagaccaattatgtactatggtttgtttaatgttctctggaagagtttatgaataatttctttataatttgtaactttttatgtaatgcaaatatgtaaatgaaatatgtttgaaaatctttggggctaaaaggtggattttttaaaaatgtggtcagctgaaggaccaaacctttgcattgtaatttaatgtgatcttttagacatgaactttttatttttgatttatttttattttttgtagtgtattgttttgattcccttctcatttcctttttttgtatattttttattttattaattttactttttctatattatcagagatgggagtctcactatattgcccaggcaagtctcaaactcctgggctcaagcaatcctcctgcctcagcctccagagtagcaggaactacaggtgtgtgccactgcacctggctttttattttatctttaaaggaaattttatttcacaaccattattactgttttaaatatgtacctaatccacattaatataaatacattattattaaaatacaaacaagcgctgttcaaaagaaatgtcatttttaagcttaatgtctagtgacattttgtgttgttttgctgatttaatacttaagaccacatttttacatgaagtagtggtttggtaatccctaatttactccagaaagcaagtcaggctgaggaaaggcacccacatgcattctctcacaagcttcacggtccctagggaaatggcctggctcctctaggacttacagtgttcccttggatgcccaaatggattgtctacattcctggtagaaggttgcagattgtaaggaccagtgttcccacctttgttctgcatccacaagtgtctttcacaaatacaacacactccctttggctacaccttatatataataggttatgcacatgtatgtgtgttggtgggggtggatgcttcccactgatctagatcaggatccaaatcagacatacacatcaggaaaggagggaagatagccaggaagtgatagctgggcagaatgaaggtacagaatgggcaggtcttcctgatttttcagaagagcccaggaaatctgaaaatctgaagagtgtgtgtgtgtgtgtttttgtgtttttgtttttttttttttggagacagtctcactctgacgcccaggctggagtgcagtggcacgagtttggctcactgtaacctccgcctcccatgttaaagcgattctcttgtctcagcttcccgagtagctgggattataggcgtgtgtcaccacgcccagctaattttttgtatttttagtagatacagggttttgccatattgaccaggctggtcttgagctcctggcctcaagtgatatgcccgccttggcctcccaaagtgctgggattataggcatgagccaccaagcccggccggaaatctaaatctttattgtgctgtctccaaattctgaaatgttggcagctaatgcaaatttttttttaaaaatgtgggttgaacattttaaggaggagaaagaggcctgtaacagacacaactctctaaaaaaccacacaggcaggtgggggaggtagagctcaaggttttgagaaagctgctctccaggacgtaacatacacttaccctgggactccgaggcgctaaccctcctgcacctcgaggcccagagcaccaagtgcgatgtccccatctcctggccttgcccacctcattgccctccatatctcctcatcacaccttcgattccccaaaccccataggtttctctgcctcccagactttgccccttattccttggatggcctagaatgccattacctgccatcctcccaggcactgcctgttgcaagccaggctcccattctcattcctcactcctagagggttgcatacagaccttcctattgcacccttctagatgggctgcttaggtcagtgtcacccacagacaccatgcacccagtgacagtctgtgagagcatgcagcctacccccatccgtgtgtggagctcagccttcataaatgagcatcttgaaggaatgggtattaaataaagtcggaataggtgggtactttgtaaacatgataaccaatagccagtttaatatttagtgttaaatattaatgacatctytaatgcaattaggaacaaaacaaggctatctgcactatgattattaatattctgcaagttctggtaattgcactaaacgataaaataaatgcaaacttaaatattatcatcatttaataargtrattagggaatatgtttttgtttttgtttttgttttgaaatggagtatcactctgtcacccaggctggagtgcagtggtgtgcaatctcagctcactgcaacctctgcctctcaggttcaagcagtgctcctgcctcagcctcctgagtagctgggactacaggcgtgtgccaccatgcccagctaacttttmtatttttagtagagatggggttttgccatgttggccaggctggtctcgaactcctgacctcgggtgatccacccgcctcggcctcccaaagtgctgggattacaggcgtgagccactgcacttggcctttttttccccgttgagacagagtcttgttctgtttcccagactggagtgcagtggcatgatcacagctcactgcagcctcaacctctcaggctcaagcaatcctcccacctcagcttcctgagtagctgggactacagctatgcctggctaatttttaaaatctttttgtgaagatgcgatctcactctgttgcctaggctggtctcgaactcctgggctcaagcagtccacctacctcagcctcctcaagtgctgggattacaggaatgagctgccgtgcccagctggtaatagattctttatcaaaactgttacaagttaattattagatgaacatcagaatatagtagcaattaatagaattcaaaatctcaggagggtgtaccaaattttagatgtcttaacatatttaggaaatgggagatttatcatcctgtaaatagttcacgttaggaaggttcatgccaaggaagttaacataggtaagatgaggacatttctattaaaaaagagtttcaagtaaaataaaatggaagacatttaagataattaagatgagcttttaatatacgaaatgctgccatcctaccctttacataaatttccagaaacctgggaattatatacttttttcttttctcattctgtatccagcatgaagtattgctggtttcatctcctaaatgtttctcagattcatctactcatgtgcatcctcccagttgtttgaaaggcttgttccccggtgctgtaaagaaatagcacttgaacataaatttaatttatttagtaaggccatttttacttgctgcagaaggggtacactcatcagcagttttgcctcgagagtacactgaacaaaggagacagggtcatttataacctgatgtatccaccctactgctgtgtctggtttccattaactggaacgggacctcacattctgtatttgtcccgattggctagcaacttagaactttttaaaagaggcaaaggtagaggggaacaaaggaaggaggaagtaacttgtggaatgttgagaaagataaaaacacttttaaataaggaagaggaacaggctatgacctaatgcttgcttggaccagtgtaagcatgctagggcaaatacttaggctaaattgtgggagctaagaacataaggtacattgatttccttattaccgctagcagatatttaagaatgttaacacagttctttgaataaattttgcgtctaaggaataaatactatttattcctaattagatggggaggaaagtctttgaagaggaacctttactttactttttacaccgccatagctataattgagatcctcaggatcttctttccagactgcctccattcttcacctcttggaacccgtcgttttgacttgtcactagtgggctcaatctcaaaacacagagctaaccgtgcaacctctctgcttaatacctagggtggctcctagtcacccggccaagctgaacatagaacacaagatcttcattatctggcttctgcctattcctgggaccttacttcctgccattcttcaccttgcactttgagctctggtttcctgcatgtcatgctgttttatatttcagtgtctttgctcatgctatgccctatgttgaactcccttcccactttctttgtttagctaattctactctaagatacagctcggagattatctcctcctggaaaccatttctaagctccatagttaggctctgtggcctccgtgtgctcatattacaatctgtgcatttttctttcttagcaccaactgtattaaaattaagttaatctgtttttatggtgctcccttcctcctcacctctccctttgagcattagctcctcagctgtggtcactcctcagcagccatgataattagcatgttgtctggcacatattgaacttcaatggaatatgaacgtaataagatgtttatctgtcttgctaaatgttttgaatagtattgtgctttctaatatggtaagaacagtagataagtaggaatggcttgtacctctgcctgttggaagatcttagaattgtcctttttctgtgatacagtctagatcaaacatggttgcactttgctataggacttcaccaagggaaacttaaaaatctgtactgtctgtaataggactataccaaacaaatctctggctttatcagtgctctaagaccagcattctgtatattgattggattgtcrtataattgggggtaatgatttgaactctttatgttaggccataggctggtataagttattcttctgctatagtaaatccttatgaaatgttttatccatctggttcttccattgtggaggtcctcctctatccctggaggagtttctgtggcacaatgaatttgtaattttgaatggaatgtttcttggaacactaagtaacctcctaaggggacatcagaatgctttattgaaatattttgcacctatttcaaaaggtagagactgatagcaagtacaatttaagttaaaaaaaaattatatggttgatttttaaggaattattaattttttatgtgtgataatggtattgtgattgtattttttgaaaaagattaatcttttaaagatacatactaaggtatttacaaattaaatcatatgctttccggaatgtacttcagaccaatctggggttggaagagtaacgatcagagtagagatgaataaataatatattgattatatatgtgtaattattgacgttgaaagatggatacattgggtttgttacactagttcctctggttttgtgtttctwtggaaaatgtcatttatacttcttactgtgaataataagcattttaatactttaatattgtaaaagttagattcttgcatgtaagttgtgaaggaatacagatatggtgttgaattctttaattttgttagctcaatgtagttgttaatgtgctttcttgagtagtttaaggtaacatggagtgatggaaagaccactggatttggagacaaagataaattttcatatctcaactttgacatcccatgaccttaagcaagtcatttaacctgtctcagcatcactttctccttctgtagcaatacctatcttagaaggttatttttattttattttatttgagatagggtctggctctgtcacccatgctggattgcagaggtgtgatcttagcttactgcaccctctgcctactgggctcaagctatcctcccacctcagcctcccgagtagctgggactactacaggtgcatgccaccacagccagctaattttttttttttttttttttggkggagatggggttttgccatgttgcccaggctggtctcgaactcctgggctcaagcgatccacccccccttagcctcccaagtgctgggattacaggtatgagccactgcacccagcctcagagggttattttgagaattaagtttgataaaggttaaaatcacttttaaaactaaattaccatacaaatttttgttttttaatcattttcttccttcttattctatattattaatcatctaaccatacaaatgtaaatcaattgagcactacttttccttttacataataaatgagaacagctagatatatgtggtaaattgaatggatgaaatttgtttattggggctagcactggtgatggaaaaggttcatgcccaattagaatacagagaaggtagagctaggatttatgaaagaagatcacacaaccacagaaatggaaagcataatagagaaaatggagagtagtcttattttgcctcttaagtcctgaattccatcatttattcttaaatagtatgtaagccctttgaagcaagagtcaaatctggacaaaattgatgttattaagtcttttagaaagatgtagcatcatggttttatgttttgcattcactgacgtcctgtgaacacgaaacaaatttaaggaggtaaagaggataatagtcaagtgcaaaatctagtgtggaagagaagttaaaaattaaaagaaaaattgaaatgacatgagtttgcacagaaaatgagaaattctagctaaaatgttcactctattagcaaaaatgaaaacacgtcagttaaggatagtagtactgtgtctatttgaagtttattagaaacatattttctttgattatacagctagataggctctcagaagcataaaggaaactttgtatgtgggatgaattttaatggaggggtatgttcttggtttttcttctacatgtgggtatgttctttgttttcaacccaactggtaaacaaaggaagtaattctattctctcatagtgacagagaggatatgaaattactttctctgttactatttaatgatcttctaaaaaatttataaaccaagctgccctattttgcaggcataaatctatatttgattcaggtgttagagatttttgccagaatattaacttattttctaataaaatacaccagagcctgaatctatctaagaattaatcataaactagagtgtttgggacattatttcaggtattagtcactggaataacttttctaagatagtctctcctgtagggcattctcactacatggacttcaaggacagccatgtagccagcaagcttccagtttgctagtattgtttcttatgacaattatgtaaaatgcctttttaaaaacgtgtaacacttacgatgccattcaatctatagctaagttttgtgggatgccacatcatttggatcaatggttccagtaaaatgttctgtaaacttaaatccagaagatcagtcatttgtggtgaagttatttatttgaagaagatacttctcagttttatatgaatattggcaaacacttttatacttccgatttttaaatgttgttcacatgaatagccagttctgccttattcctaatttcccggccagcaacccagtcatcctgaactgatggtgctgtcatgtgtgaccatttcctcacttccccctcagtgaaatgatgcgccatcattagtaatccattgtatagtggcgtgtaattttttttacccagtactctattggtggacatttaattcatttgtggtttttttgctgctgtgaatatcctttcrtatgtatcttcttaaatttgtgtaagtataccttaagatcaattcttagcactgaaaatgcttgagatataatttttaacataatttagaatgcttaaattaaaaactttttgtaggaaaagaattattttacaaataaaaatatcttttccatttttttaaataatatttcttagaaattcattggtttcagtttttgacaaataaagacaaccagttcaggtacttcatctagcaaaataatcctttaataaaaatcacaytttgactgggcacagtggctcacgcctgtaatcccagcactttgagaggctgaggcaggcggatctcctgaggtcaggagttggagaccagcctggccaacatgatgaaaccccatctctactaaaaatacaaaaattagctgggcacggtggtgcatgcctgtaatcccagctactcaagaggctgaggcagaagaattgcttgaacccaggaggcggaggttgcagtgagccattgcgctccagcctgggtgacagagtgagactccatctcaagaaaaaaaaaattacatttttatatatcttttgttgatttatttatctttatacatagaatatgacaataacttcataaaatcttaaacagatatactcaattttttcttttatgaaatatctcattttcagaaatacaattctaaagggcagttttcatttttggaaggcaaaaataggctttattaattgtgaagtgacatataaagaaacataaatatagctgtttaaggtttctgatttaactgcttatcttactatgtattttagatcttctctcctgtatctaattggcttgtagtctaatattgtagcaaaatgttggaggtttacctgcattattttgcatagatccataaagtgaagatggggccagccatggtggctcacacctgtaatcccagcactttgggaggccaagatgggtggattgcttgaggtcaggagattgagaccagcctggccaacatggcaaaaccctgtctctactaaaattacaaaaattagccaggcatgatggcacatgactgtaatcccagctgctcaggagactgaggcacgagaatcacttgaacccaggaggcagaggttgcagttagccaagaytgtactgctgcactccagcctgagtgacagtgagagactgtgtctcaaaaaaaaagtgaagatgagcaagcagtagccattggctaagtcatttgaattcttaaaaaaaaaaaagatacctagatagaaaacttgaaaattacctattggaattggctacatatatctgcttgttctaaaccagaagtctgctttgaacctttacaattggctcagtttatctttgtccaggcttttagcttcatcaggtacattttctactttacaatcccattttaatttatggctctaaggacccttgaaattttgcagactgaaaaacagcactcacaaaaacatgttaattgatctaccactagatatacagagtataatcatatttgaatgatattagggtgggtggtggtttaattcacatttcttataaaagcactgattctcaaccctaacttgtactttagaattacctggggctttaaaaaaatacaggtggccagacatcacccagagggtggagttcagcgttgggagttttagaaagtgctccaggtgagctctgctgttgtacagccagcattaagaacaactgctctattggagtggctcaaagctcattctagtaaggagtaacttaatgctgttccaaaaattaaaacatttgatgagcttaatcagagcttctcaaagagtgatatgtatgccactggtggtacataaggtaactttactcacttttagattttaataatttcatatttgtttaatgtgtattagaacggggttcccaacccctgggccacagaccagtactgttgtagcctgttaggaggtaagctgcaggtgggcaggacgagtgagcattttcacctgagctccgcctcctgtcagatcagcagtaccattagattctcataggagtgcaaaccctattgtgaactgcacattcgagggatccagattgcacattccttatgagagtttaatgcctgatgatctgtcactgtctccagtcacacccagaggagaccatctagttgcaggaaaacaagctcagggctcccactgattgtacattatggtgaatgtatagtaacaagaggaataaagtacacaataaatgtaatgcacttgaatcatcccaaaacaatcccctgccacccgtccatggaaaaattgtcttccacaaaaccggcccctggtgccaaaaagattggagaccgttgtattagaatatacatataagtatcgtatcaaattcacagtttcatgagtactgctttggatgaagctccatttttttaaaatgataagttaaagatagtgtgccaatttaaaggaaatttgccaaattacagaaataattaaacgaataggtagttcctacatatggcagaaatcatgaagatgctgaagaaacacaatggcaactttggtgaagggcaccctctaaaatttaggatttgaatccaaagtatcagtgtttttttctcccagatatgtttacagtgacttaatccttctttttcaattcagggacagactttcaaaattagtatttctgcaaatttttgaatcattgttttctaacttagtttcttgacacctagttctcttgtgaaaatgtgtcttacagatcaagaatattttgttcctctatttttctagggtataagtggacatgtggtggtaagaagaggaaggagagtgagtgtgtgttgtgtgtgtatgagagagagagcgagggatggatggctggatggtcagaggggctgatgaacaggtgactagattacttggatacctgggtagagaacaatattaataattgtagggcctcactttcctacatactcatcttctcagactctaaggaagtccagaggtctgttacaactcagaattgtttgggaaatactgctttaggctctttcactagtaacgtggattgctctgggccaattaaaatgagctccacataaagatatttagctatcctgacctctctgagcaggctcagagaaattcgaataggcaaattacctcttgctacaaataactgcttactgttttatcaggaatgtatataaayttcagttatagaggcagctgccctgaacaagagtagccgcttaaattatattacgggaagttaaaaatactgtgatgcagctgtaatgttatgtttaaatgtctgtcctgtataattttgtagaatggaagcttcttgcctagagctggccttggaaggggaacgtctatgtaaatcaggagactgccgcgctggcgtgtcattctttgaagctgcagttcaagttggaactgaagacctaaaaacacttagcgctatttacagccagttgggcaatgcttatttctatttgcatgattatgccaaagcattagaatatcaccatcatgatttaacccttgcaaggtaaytaatttaagcttttaaatattcttccttctgaaattagctattactttaaaaaatatttctattcaattaacaaaaactaacttaatacatttaatgagttctacttcagtaacatcgcttttcaaaactaacctttaggctgaacacagtttaattgaatgaatagtagtgaattgaccctagagtttaattaaatggatgaaaactaattacattcaaatccagaaatgtaagttttaaatatttatttaaagtaggtttcaaagccaatgggtttttcttaccttaagcatgtcagtttgtcctcttggaaaactgtactctggctactttatattttaacaccatttgtattttaataccatttggttttttgttttttgttttttgtttttttcaggactattggagaccagctgggggaagcgaaagctagtggtaatctgggaaacaccttaaaagttcttgggaattttgacgaagccatagtttgttgtcagcracacctagatatttccagagagcttaatgacaaggtaataccgcagcattagatggtaggcctaatattttcattcaaagggctttgcattttaatactatttaattattctatagtttattttaaaattaataccaaaaaagaaaacatttatagactaatagaagtaaaagaaaaaaaatttaatggagaaaaagaaggaaatagtaagaggtctttcataagtaattatttgattggttctgtrtggagagccaatataaaaatttttttcccttgtccgtaatactaaggatattacaaatatatatgataaacctgacctctgttttcaaaatgtaaactttgctgatgtcttcatttaggtgggagaagcaagagcactttacaatcttgggaatgtgtatcatgccaaagggaaaagttttggttgccctggtccccaggatgtaggagaatttccagaagaagtgagagatgctctgcaggcagccgtggatttttatgagtgagtaggggctgatrtgggcagtcatgtaggcccatctaagccgtggatctgctgtacgttctttattcagtagtaagtttttaagtttggcaaagattttaaagttatgaactagcaaaatcatcaattcagttgcttaaatgttacagtgttatattagtagtaatctgcagctttcatttaagttgcagaccagtgccacttagtggcaaaagcaagaaatgtcaatggttggtctgttatttagagtaatttagtcttttaccaatagaatttcatagaactacttaactataggggttccaagattaactctgtgcttgaccctgggcagaaacctatctgaatagtttaataaagtgttcccagctatttcctataattgctcttcatcatagatgtcatccttaaaatgttgcacattatggctgtaagcttccctacatttttttctgataaaaagaattagatatgtaaatcacatacataaaattgttctgcaaacttattttttcatcactttttgcgatcccttagggaaaacctatcattagtgactgctttgggtgaccgagcggcacaaggacgtgcctttggaaatcttggaaacacacattacctccttggcaacttcagggatgcagttatagctcatgagcaggtacagtggaaagccttggagccagatcatttcctccatcaaagttctgaacagtgattagatcattcttcagttttattttatctacatctaattaaaattgtttgtttcagcgtctccttattgcaaaagaatttggagataaagcagctgaaagaagagcatatagcaaccttggaaatgcrtatatatttcttggtgaatttgaaactgcctcggaatactacaagttagtctaatatttctgtagataaatgtaaaatgaatactcagtcccattaattcataggctttaggtttaaaatctgattgtagcagaacttttggcatctaagcctcaatttccttatctgtaacagaatatatcaatacttcattttggggaatgctgtgaggattgaatgaaataatatactaaacacagtatctggtacacagtgctcaataaatattattgtacataagatttaatagcagcagtatgacccctttataatattggtttttatctttaaaagtaattgtttttaaatgaagttttcaacctttaatatcttttaaacctgtttagcatatgtggtgtatattgtgtatatgctttatttcactcagttatgggttagaagagaggccaaaagaaagccttgtaacaaaaatatttatagtctataccagtgatcactgaatttttttctctaccttcccaccctcttattgagcagttctccctttaccctctttctgcctatatttgactgtcactgtaagctgagtcccccattcacttacctgaagcatttacaatcccagcttcttctgtggcaggatctctcttatcagtagatttgagacatagatgatagaaagtttagacagcttcaagttgcctgatctgtgctttctagattgagttttccctagttagtggggattgaagcctcttacagattttgggtagaaggcagtttgactaaaccgaagacacagtgattgatttgtattttgttaaagaagccaatatgagacagttctggataatttgtcatcttcataaaaaaggtaaaattgttttaggcctatctaaaaaaattaaatagcattccactttgctttaaacatcaactaatggttaatatttgttggttaggttagttagatatgaaatagcctcccaaataaaatatatcactgtgtactatgtgaaggagtatatattttgattttaaatataaaaatttcctatatttaaagccaagggatatagagragtcttaattattaaatggtgtatctgtgttaaatactgaaaggttctattataaaatggatagtggctatttgactaaagaagcatgaatataaagtaatgaaacttagtttttttcctcccaataagcaggctagaactcagaactttatatatattccaagtcgttggttagaaatatttttagaactcttctttagattttttttttttttttttttttwaatacggagttttgctcttgtcgcccaggctggagtgcaatggcacaatcttggtgcactgcaacctcggcctccccggttcaagcgattctcctgcctcagcttctgagcagctgggattacaggtgtctgccaccacgcccagctaatttttgtatttttagtagagacggggtttcgccatgttggccaggctagtctgggactcctgacctcaagtgatccgcccacctcagcctcccaaagtgctgggattacaggcgtgaaccaccacacccagcctggaattgttatcagggccaaacaagaaggctaacaatgtagatccatatccttccggatacaaagcagtagtttggtaaacctatgttagtaattgaatttggttccagaaagatttctgatcatttacaaatcaactgtaccatcaaagaataayggtatgccagaaagcattatgccacaggatctgaaagcaattccaaaagtctttcaaaaatatttgaaaagacaggcaacattagaataagtaggtagcctcccaaggtgacagatttgaaggtatcatcattaaatatgtaactttagatttgtttgcttaaaaaaagctatcacgttaccgcatagtaatttgtcatatagttataagtgatatgaagtaattatactatttgacagaaataatgggagggtcatttaaattactgaatccaaaagcatctataggtttaagcactgataataacacattaacatttatacagcaactactatgcacaagatgctattctaagcactttatacatattaatttaatcctcacaaaaatccttcgagatatttcccccattttwtataagaagagactggtatacagagagattgagtgactttgcccttagcttagtaattggcaaagttgggatttaaacccagtctagctccaagatctatgctcttaactgctacgctagcttctcactggcaataccacaggtagaatttgggtaatgtttggatgtagtattcagtatttttcatgagttggtgactaatgcccgatacataagaattttacctaagtggtgactaatagcctacacataagaattttacctaaatattttaaattttgacaatgcaaaggtgacggtatgattgaaaacagatgtcatgtggaaaaaagcctcttttagctattgccaatactaaagggaaagtttttttaaatgttaaagatattatgttaatctctagaacctcttgattttatgtttcaatactcctttactttgatgaattgttaggattctcaaatttattctaaaagtcttgaatcttctttctgtgtttcaaaaacgtcttttcattttgtctaaaagtaatggagaaagtacgggatatgaatattaggctctcagagatttaaagacagcagaaagcagcagagaggaaaaatgagagttttgttytgtgattcttaaagcccaawctgagaatgatcattatataagaattaatttcttcttgtaggaagacactactgttggcccgacagcttaargaccgagctgtagaagcacagtcttgttacagtcttggaaatacatatactttacttcaagactatgaaaaggccattgattatcatctgaagcacttagcaattgctcaagagctgaatgataggtatgttttacgtctttttaccataactaaggtaaaatatagatgcattattgaatccctagaatttttcctttgtttcttttcctttgttttccttaaaatcccttttaaggaattttctttcagtgatatcctctgtatatcattgtatgaagggctagtctgtgatagaggattagtctggttccatatgcccttgacccaagatcaatgactaggtcccaaactcarttacctcttcagaagtcttcctggtgaaaccccgtatctactaaaaatacaaaaattagccgkgtgtggtggcgcacgcttgtaatcccagctactcaggaggctgaggcaggagaatcgcttgaacccaggaggtggaggttgcagtgagctgagatcacgccactgcgctccagcctggcgacagagcaagactgcatctcaaaaaaaaaaaaaaaaaagttttcctaactacataagtgtgggaattgtggtgaacttagagataatgtccagtgtgaagggggcaactgctacccaactccaactaattgttgccagccaggaatgaaaatccgttatgtccacatcttcctgttttttaaagagaagctggaagtgctgagttttatatgaaatctgatttttaaatgttagtggctaattcagtttttttgttttactgtattaaaaaacattattttccagcatttagtctgtgatgtttgctttagaagatcgattttgtttttacctcagtatgagagagaacttttcgatgcagatgttcaaaatgaagtatgctacctcaagaggtagtgcgttctctctccctgctgctcaaacacacactgaataattacctggtagggctgttatagaaggaaaatagggtagtggaccagaatacctatccttgagatttattactttataatgtatttcatattttaaaagcatgttttctatgttgtaatacttgactgtgagtttagtattatgtgggtattcttttttttaatctgggtattctagtatgtctataatatcatgatagtatgttatttatatgaaagaccaaatcaatccaaagcattctttatccctttagttcctgctagatagcttttattctatacataggacctcttttcaaataactgcatgttckctttgaataacgttttagaattggtgaaggaagagcatgttggagcttaggaaatgcatacacagcactaggaaatcatgatcaagcaatgcattttgctgaaaagcacttggaaatttcaagagaggtatgaaactaaaaaaaatgctgtctgtgctattgtaatttacaaattagaggttgggggagggaaccctatttctctagattgatcatgtggctgrataataaatttgattatatatcattctcttggcataagaaccccagaaagcattttgaggtacagatcacagttatgtttgtattggctttsatgtaggaagacaggaaagtaaggccgggcatggggaagtggaaggagagtactaaaatatgcccctactctacccgcatctctacatggagaagtagcatggtattgaaggaaaagcatggttcttagaattaaggactgcttcctgttgtagttctgccacttactggctatttgagcttggaaaccttttctgagcctcagtttctctcatctgcataatgggaataataatatctaccttgcaaagtgttataacgattagagctaatgtatattaaaagtgcctagcaaaatgtctggtgctggcttaataaacattattattatactatgggaataaaatattctaagaaaattttattcatataccaagttaatgtgtccaggataatctacattattacttagtatgattccagagaacaagagcaatctaatgtttagagaactaaagaattaaaagaatacaattagctgtcctattgtgatattttagaagcttgctttttctttctgtattctttaagacaactattaatggaaaaaaattttcattcattcatagtctcataattctaatataactattttcatttctctatattttcttctagttttaggttcactacatttacaaataatcttcaccattctttctctttaaatactactctaaaatataaatgtttgtgttgtaggttggggataaaagtggtgaactaacagcacgacttaatctctcagaccttcaaatggttcttggtctgagctacagcacaaataactccataatgtctgaaaatactgaaattgatagcagtttgaatggtaagtaataggacttttaaaacccaatttttttatcctcaatatttagattaaagttatttatcacaaatttggcatattcagagagaatatataacatgggaagttcaacttattacacttttttgctgtacacagctctgtttgtaaatatatattacaattatatattttgtatataatatatatataattataatatataatttataagtgtaaaacaatattttatagtttttaccatgaacttaggaatggtgatggtattgttcttttcttttgtaaaaatacatttaaattctctatctctaagctcattcaaaaatttgtaaatgtgaaggtgccaaaattttaaaatgttattgtttatcctttttatctcatatcgttttacgtatctgttttctgtttagttctttttcccccatttcatttccaaggtgaattttcttaggacttttttaaattcagaaaatctaagatactctctttatttttctttctttttttttggtggcaaaacctatctttaggacaccttccttaggtgccgatttgtttgacatttctatagcgaggaaatttgctataatgtctctttttgagtgaaagaaaatctacttttaaagaaataaaagggataagattaggatcacatttttaaatttcatcagtatgtgattctatatgagatcattttcctaagcttgagaaattctcagtctaaaaaaaactactgacaaatattttgaattttaaagtcagtgataaatctacctttactttttccaatttttttctttaaactcaggaaaagaaattagtggctagtcatctgatttagattttcaaagaacatttagtgaaaagttctgaagtgtgaaccgtataataatttgtgactgcgtgctttgtggttgaatgatgggctaagacgtttttctgtgctgaactttcaaataggttatgccgttaagagctctcatctttaaaaagcaaaaacaaacagtcgcttgtcttcatagacccttctagctgtagacctgttcctttgttcgctcttataacaaaacctgaaaagacactaatattcattgtctttacttccttgcctccctttctctcttcaacccattcccgttgggctttgccctcaccatgtctctgagacctccattttaccaaatatatcattcagttttcacatgtcagcttacttgatttttctcagcaatatttcctatagccaatcattcccttctgagaaaactttcttcatttggcctccaggattactctgcttttctggtttgccactctcgtctttattctcttctctcctcttcttcatctttcctctacgtttgtagtgctcagggttcagttcttggacctcttcttcctaccttctttccctccctattttccatctctctctccttccttcttactgattttatcctttttccttctattctgtgctttaagtcagtgcttccaatagaacttttctgtgatgataaaaacgttttacatctgccatccaatgtaaaagccactagctacatgtggctgttgatcactagaaatgtggctactacaagagggagtgaatttttaatattacttaactttggttaattaaaatgtagagagccgcatgtggctactggctattggacagcacagctctagataatctcatccagttacttggcttttatattgtctatatactgattattttcagatttatatttccagccaaaatttctctcatgagtttgagactcatttgtttaaaattttccattgtcatgccatatctaattggcatctaaaacttagcatgtccataatgttttctcctaaacatgttcttcctgtaccccaccctatctcaggaaatagtatcaccattcactcaactaatcaggccaaaaaactaggggtcatacttgttccctttctacttttatttatttattttattttattttatttttaaagacagaatctcactctgttgcccgagctggtctcgaactcttgtcctcaagagatcttcccacctcagcttctcaagtagctggccttgttccctttctttcactcacttctacatcaaacctatcagaaacctgccttcaaaatatatccctaatctctcctacagtgtactctgcaacaatcttagtataagctaccgacagctcccagcagagtcctagcctaccaatgatttctcttacttcgattctgcatctctcacacttacttttccacacaggagccagagtgcttttttttttttttttttctaaattaaaaaaatattttggccaggcacagtggctcacgcctgtaatccccaacacttcaggaggctgaggcaggtggatcacctgaggtcaggagttcgagaccagcctggccaacatggcaaaaccccatctctactaaaaatacaaaaattagccaggcacaggggcacagacctgtagtcccagctactcaggaggctgaggcaggagaatcgcttgaacctgggaggagggttttgagatggaatctcgctctgtcgcccaggctggagtgcagtgacggaactataggcacgacctcctaggctgaagtgatcctgccacctcagcctttcaaagtgctgggattacaggcatgaaccatcatgcctggcctcagagtgctcctttagaatatacgtcgttcctctgttcaaaacccttcagttagttcccatcacacctagaacggaatcctcagtcctcaccatggttgaaaggccctatgtaatctgaacctatctcttcagcctcttttcctgccactccacctcttgctcactctggctgtatgargacaggtgttttttggtctcttttgttcattgccatctccccagtgtgaggagaaaggatttgtaagaaaacttgtctatttctggtgttggctcaaggtagaaaaaaggagccttcgctaaaaatcttaattcatgaattcataagcctccctacatactggtttggaatttgatttataccatctgcacagtctaagaaaccctaatccattaaagcacttttgggttagaggtgttcctagagacttagcagaagtaagaccaaatagtttctgggggaaaggcatccttgattccaggtcataagsgtttcacaacaaaaaaattaccaaatatgtaaagaaacaagccaagatagtaaggaaaaaaataacaaaattaggtcatcaagwtcttcagatgttagaattatcagatatagaaaataaaatgactgtggttgaacgtttacagaagtaacaaggaaatgaaaacaagagaataacaaaaatgttaggtagactgaaaaaaaaagctaacatttattgagtgcttatgatatgccaggcactgatttaagtgctttacatgttttaactcatttaattgtaacaattctagtagttaagtttctgttatccttaatttacaggtggggaaatggaggcaagagaggttaggtaaatttcccagggttacctgtgtagtaagtggtagagatgggagttaagcttagtcactctggctycagaatccgtcttatgtgatagttatgtcttaatgtgatgttaacacacctcaataattgataaaaatcagtcaggagtcagacatcagtaataaagttgagatttgaccaacacaattaataggcttcatctaatgcaatattttgcaaactatgtgtctgacccattcatgagttataaaatgagtcttatgagttgcagttagcattaaaaatacacatacaggggccrggcgccatggctcacgcctgtaattccagcactttgggaggccaaggcgagcggatcatgaggtcaggagatcgagaccatcctggctaacgtggtgaaaccccgtctccactaaaaatacaaaaaattagccaggcgtggtggcaggcgcctgtagtcgcagctactcgggaggctgaggcaggagaatggcgtgaacctgggaggcggagcttgcagtgagccgagattgctccactgcactccagcctgggcaacagagcgagactctgtctcaaaaacaaaaacaaacaaaaaaaacacaggaggccaggcgcggtggctcacacctgtaatcccagcactttgggaagccgaggcacgtggatcacgaggtcaggagatcgagaccatcttggctaacacggtgaaaccgtgtctctactaaaaaattagctgggcgtggtggcgggcacctgtagtcccagctactcgggaggctgaggcagaagaatggcgtgaacctggggggcggagcttgcagtgagccgagatsgcgccactgcactccagccgacagagagagactccgtctcaaaacacacgygcgcgcacacacacacagccgacagccagactccatctcaaaacacaaacacacacacgccggggcagtggctcatgcctgtaatcccagctcttgggaggatcacttgagcccaggagtttagaccgacttgggcacacagggagaccgccatctctccaaaaaattttttaattatccgtgcatggtggcatgagcctgtcatcccagctactcgggaagctgaggtgggaggatcacttaagcccaggagtttagaccgacctgggcacacagggagaccgccatctctccaaaaaatttttttaattagccatgcatggtagcatgagcctgtgatcccagctactcgggaagctgaggtgggaggatcrcttgagcccaggaagtcgaagctgcagtaagccatgatcatgctgttgcactccagcctgggcaatagagaaaaaccaaaaaactacacacgtatgtgtatgtatgtatataaaactgttgtgtgaagattttgttgtatgtttgtgtatgttctaggtatatatgtgtattttttaatatggggtcacaccttaaaagtgaaaaccactgctttaatggaaatatattgacctaactggtcaatttccattatttttaagtattcatgaaacatttacagaaaactgacaataaagcaaatctcaacaaatttaaaaggatttgtatcacatctgtatcacacatgctctgagcacggtgcatttaatttagaaattaataagataatatataaaacattaatctgaaaacataacatttctcagtaacttacaggttgagaaagaaatcttaaagttagaaagtaacttaggactgaattataaaaatattgtttcaattttgtggcatgtgacttacattggtacttagagcaaaatttatgttgtatttaaaaaggaaaaagctggccaggcgcggtggctcacgcctgtaatcctagcactttgggaggcccaggcgagtggatcacaaggtcaagagatcaagaccatcctggccaacatggtgaaaccctgtctctactaaaaatacaaaaattagctgggcgtggtggcatgcacctgtagtcccagttactcaggagactgacacgggagaattgcttaaacccaggaggcggaggctgcagtgagccgagatcacaccactgcactccagcctggcgacagagcaagacgccatctccaaaaaaaaaaaaaaaaaaaaaaaaaggaaaaaggctgaaagcttaataccatctagcttaaaaagtaaaacaaacaaacaaaaaaaaacactgaaagaaggcaaaaattaaaaagcagaatttaataaaattaaaacagtgttttctttaagtcaaaatttggttccaaattgtttagtttaattttgactaagtctacagaaagagggcataataaatatgcagagattaaaaagagattctgaataacgttatgacaaaatatttgaaaatctaggagaaatgggcaatttctggaaaaacaagttaccaaaactgttccaatggtaaaatgtaatgtgaatggcatgctaatggctaaaattataaagaaattcgagcagtaatttaaaatcttcccactaggaaaatacctggcctagatgattgtacaagtgaggtaaaccagccacttaagaaaactaattataataccttacacaaaaattttataggcaactgaataagtggacatacttttatcaatctttctgagaaccataaccttgatatccaaactagacaagaacaatacaagaaaagtaaattaccggccagccttacttgtgaacataagatataaaaatctttacaaaatattagcaaagcaaatccagtaatgtattttaaaacaaacggggagccgggcgcagtggctcacccctgtaatcccagcactttgggaggctgaggcgggcggatcatgaggtcaggagttcgagaccagcctgaccaacgtggtgaaaccccgtctctaccaaaaatacaaaaattagccaggggtggtggtgtgtgcctggaatcccagctactcaggaggctgaggcaggagaatcacttgaacctaggaggcagaggttgcagtgagccgagatagcaccactgcactccagcctgggcgacagagagagactccgtctcaaaaaaaaaaaaaattcaagtggattcaacattagaaaatcaattaatgtaattcactaatgaacatagtaaagagaaaatcacccaaatatccaaatctattaaatctatttcatatagaactaatgaaatagttctatttcattagaactattaaatgaaaatattccatttataagacacagtagcagattggagaaagaataaaatccaactacacactacttgcaagagaaatatctaatataaggatataataaacctgaaagtaaaagaatagaagattcatcatgcaaaaactaaccaaaagacagtcagtatagctatgttaatagataaaatgtactttaaggcaaagggtcttactagaaatgaagaaggtcggctgagtgtggtaggtcacgcctgtaatcccagcactttgggatgccgaggctggtggatcacttgagatcagaagttcaagatcagcctggccaacatggtgagaccccgtctctactaaaaatacagacattagctgggggtggtgcagggccctgtaatcccatctactcaggaggctgaggtggaagaatgtcttgaacccaggaggtggaggttgcagtgagccgagatcacgccactgcactctagcctgggcaacacagcgaaactccatctcagaaaaacaaaaacacaagcaaacaaacaaaaaccaaagtaaatgaagaaggtcactttacggtggtacttaccagtgattaacagttcaattcaccaggaagatgaatgcattaaatgtgtctgggcttaataggygtttataacaaggcctcaacgtacataaagcaaaattgaccaaagaaataggaaaatctacaatcataacgggaaattttaatacatatctcttagtaattgatgggtgataaaccatactcaagtgggaagacaatttttttttttttttttttttttttaaagacaggctcttactctgtcaccaggcggaactgcagtggagtcatctcagcttactgcagcctctacctcccaggctcaagcaatctgcccacctcagcctcctgagtagctgggactataaggcacatgccaccatgtctggctgatttttatatttttttgcagatatggggttttgccatgttgcccaggctagtctcgaacttatgagttcaagggatctgcccacctcagtctcccaaagtgctgggattacaggcatgcaccaccgtgcccggctgacaaaattttataaaagatttcagttcttctcaaattgataaaaattaagtgcactgccaaacacatcacaattattttgtggaacttcatgaagttattcataagtttatatgaaacaaaaaagttctgagaaataccaaaacattcctaagaatatgaaaagtgctttctttacagatataagtaataagacagtgtgctgttggcataaagacaaatagaccagtggaatcgagtagagagcctatattcctcacatatatggaaaataatctcacataaaaatgaattattgatggattaaggatttcaatgtgaaagacagatttagagcagtaatagtgatgatgcaggagaggtgcagtggctcacacctgtaatcccagcactttgggaggttgaggcaggaggatcgcttgcatccagcagtcaagaccagcctgggcaacataggacccctgtctgtataaaaaaaaaaaaaaaaaatggacatggtgttgcatgcctatagccccagctacttggtaggctgaggtgggaggatcgctttgagcccaagaggtcacctaagctgcagtgagctgtgattgcgccactgcactccagcctgggcaacagagcaagacctcttctcaaaaaaagagatcrggggccggccaggcatggtggctcacacaagtaatcccaacactttgggagttgaggtgggcagatcacttgaggtcaggagttcgagaccagcctggccaacatggtgaaaccctgtctctactttaaaaaaaaaaaagggtgggggggacacggggcggggggcaaaagtgatgaacagtacacaaatagcccataaatatatgagaagatatttaacttcatctcatcagcaaacatcacagtggagtactgktagaaacttatgaggtaaacaaaaattactaccagtattcaaatgatgcagggtaatggaaactcttgtgtggtattgatgggatagaaattggtataccctgaagtacaatccagcaacattctggtgaagttaaagatgygccaactggatgatccagctgtttcactcctgttgtgctcccagttayatactgctgatacccaccaaactagaagaaatgcttgttcatgtacactgagagacgtttccaagaatatctgtagtgtgcttatcatagcaaaaaaattggaagcaacccaaatatctgtcactaataaaatggatgatttcctagtccactctacagtctgttatttttgagactgtgtggatagtataaaccagttattataaaaaagcctttgccaaaaacagcaatgaaaatgaattaaggtatacatggcaacttggatgaatctcacaaacataaggtttctcaaagatggttgcagaatacatacagtatgataccatttataaatgtttcaaaaccaatatagctyyaaaaccaatatagtttcaaaagcaatatagcacatgctgtattgctaagaaatacatacatttgtaatgaaaatgcataaaagcgcagggaagacaagggaaattatgaggggagttatacaaggggagtttaatgtgtttgtaatgtttctttttttaagctgggtattaggtatttcttatgccttttaaaatattgcctaatattttaaaacattgaatggatatggaaattctctgtatttaataactttattgaaaaaagtttaaggactcgtttacttgttttctgactggcagtaagtctgtcatctaatgagatcttaaaatagaaaggggtaacctagaaaagagtaacagcatagtagtggggatgytattttgattcttttcacgcaattgaaggcctacagccttttccttctgttataaggaataaactgctctacagattgttatttttgaaactgtgtggatagtataaaaccagttgttataaaatgcctttttcaaattaaggggtaatgtagtaaccagtgttagtttccaaccaaaatgtaacttccttacatcaaagcattttagaggggaatgtatattctatttttgtgtagctggtatagaaaattattattcttggaagaatacatatttgtacaggttttctcrtttcatatgggtttgtgtatcagattttagaactgaataatgtaatgatgctgaacttgtactcttaagggctccctggtttatttgaattaattttttttaaacaaaggtgtacgccccaagttgggacgccggcatagtatggaaaatatggaacttatgaagttaacaccagaaaaggtgggtggcargttttatgttttaaatttcatgaactattataaaatgttttagtaatttttaatttaatgaaataatttaaataaggcttgccctatataggtatcmctttaaaatttgyctgtaaaaaaaaagtcagaaaaagtatagtgcaaaaagaatgagtaccgtatgctgccatctgtttaagaaaaatacatgcatatatttcctttgtagattcctaaaacattctggaataagatataagaaacgggctaacaatgatttcttctgggaagaggactgagtgtctgggttaggctagaaatactttatataccagtttgaactgtttgaatcatttactatgcaaatgtattacttttaattaatagaagatcaggaagatcaaaaggacragcttttttycccaactacatagcaacattattgccaagataaatgaaatttatgatcaagaggagagttgtttttctrgctgcattcttgaaaagcatttttttttaacaagtactttgtattgaagatacatcttccctaggctttttcttgcaggagaggggtgcacagtaaaagggaagggacttcataattagaaacaggttattgaagaaaacatcaaggctacttttttccgtttcctttgaactgaataattacattgtcaaaataggctctcggccgggcacggtggctcgcgcctgtaatcccagcactttgggaggccgaggtgggtggatcacgaggtcaggagatcgagaccatcctggccaacatggtgaaaccctgtctttactaaaaatacaaaaattagctgggtgtggtggtgtccgcctatagtcccagctactcgggaggctgaggcaggagaatcgcttgaacctgggaggcggaggttgcagtgagctgagatcgcgccactgtactccagcctggcaacagagcgagacttgtctcaaaaaaaaaaaaaaaaaaataggttctcattcttttatgtatatttttatttcttttttttcttttttgttttttttgagacggagtctcgctctttggccaggctggagtgcagtggcgcgatctcagctcactgcaccctccacctcccaggttcatgcgattctcctgcctcagcctcccgggtagctgggactgcaggcgggcaccaccacacccagctaatgtttgtatttttagtaaagacagggtttcaccgtgttggccacgatggtctcgatctcctgacctcgtgttccgcccacctctgcctcccaaagtgctgggattacaggcgtgagccactgctcctggcctttctttattttacttattttatttagccactgtggtatatttttaaaaatgcttttataaaataccttcattacagcaactttagaaaatctgaacacagaaatcaagataatcagtaattctgcctcctgatggtaactgcagttattttggcatctattcatctggcattttcatatggatattatagacactattttctaatatgtggtgatctatcaagaacatctttccagctggacgcagtggctcatgcctgtaatcccagcactttgggaggctgaggcaggcagatcacttgaaccccagagtttgagaccagcctgggcaacatggcaaaaacctgtctatacaaaaaaaaaaaaaaaagatagaaaaattagctgggcctggtgtcacatgccatgcctgtagtcccagctacctgggaggctgaggcaggagtatcgtttgagcctgggatgcagaggttgcaataagccatgattgtggcactgcactctagcctgggtgacagagtgagaccctgtctctgaaaaaaaaaaaagaaaaaggaacatctttccatgtcattaaatattcttctgccctatcattataacaataacatatgatttttcaatagtgatagtttatgtgtgaatagtcttcaaaaaaccaaaatctaattgtgtgagaatcatatccaaaatatttttattccagccattcacagagttatttggaaactctagtaatttttaaaggactttgtgattttcccaaatgtccagctcttctctgtgagtggttctcaaatataaatttgttaaatccacaaattatttttaaaagcttttaaaaaggccatttttgtctactttcttcttttaggaacatactaataagtagcaaaattaatttgctttcttctgcctacctatgtagtggtactaacagtgttatgtaagaagctgaccagattcaaccttgtaattctccaagagccaagtgataaaattctatccttaatgtaaaatatgtttaagtgtaattagttctttgtattggtttcttttcctcataataaagctgtcaaagaattcattatttcattattctcaacatagtaaagaagcatacataaggaaaaagggagacttctaggttaagaggcttcctgggagagtgtgcagtgggagggaacttttgagacttggatgcctgaacttggatatgtgaaaatgtctttactaacctcacatttgataattttgctgactttagaattcttggttagaaataatttttcttcacagtttttaagacattgcttcgccctgtattcttgttttcagtattgttgagaagttcaaataaatatataaggaacatttttaatttttcttcttgggttttgggtgcagttttatgttctcacatcaaggaccattttccttttctctaaacaatagaccacgaaatccactgtagtaaataatttccccttataacctgtatgtgaaaaggaatcgatggcttggttcacttactagctacatgttttaaaaacagcaacaaggccgggcgcagtggctcacgcctgtaatctcagcactttgggaggccgaggcgggtggatcacgaggtcaagagatcgagaccatcctggccaacatggtgaaaccccgtctctactaaaaatacaaaaaattagccgggcatggtggtgggcacctgtagtctcagctactcaggaggctgaggcaggagaatcatttgaacctgggaggcggaggttgcagtgagccgagatcgtgccactgcactccagcctggcaacagagtgagactccgtctcaaaaaaatttaaaaaaagcaacaaatgtatacacacacacacacacatatatatatatatatatatatatatatatatatatatatatatatatataaatgagttctcactatgttgtccaggctcaagcaatcctcaaattcctgggctcaagcaatccttgtgcctcagcctcctgagtagctgggattacaagtgtgagccaccatccctagctacatgtctcactcccctgtacatttatttcaatttgtgtctcatggggcacttttctggattggtggaaatgttctttgtattgattggagtagggtttatatggcttccaatcatagacttaaaatctgtgcatttgactgtaattttacctacgaaaaaatgtgtgtcactaaaattattacatagcatgaacctttagacttacttgtaaacatttaagactgaatgttaaagctgcaaatgtcagagctattgtatgtagtgcatatttttccactgtactcaataaatgttattttgttatttgtaggctgtcatgtatttaaaccagatctagacctttataaattggtttcgcctattgagaatttmgtatggtattagtaaaaacagtaccgttttattttttaaaattactatgttttatatattaatttttatgtttaaaaattctacatacatccaaaaattccagttgtaacagatttttaagtaactcacgtctagagtaaaactttggctccttctctgaccattcatattttatttttayagagttttggtaaaccttgctttcttattcgtaggttcttaaaaaccagcattttaatgttttgataatgagaatccacagtatgcatttggtacaagtcttgaaaatagtgcaatatactaaaaaggatatttttaaagagatctaaaattcttcctctctcccccratagtaaataagtgagtacgtcaggttaatattatgggaaaccagaagagagctggggatttgggggtgtttattcacctgccttccatttataattttgtaggtacagaactggaacagtgaaattcttgctaagcaaaaacctcttattgccaaaccttctgcaaagctactctttgtcaacagactgaaggggaaaaaatacaaaaygaattcctccactaaagttctccaagatgccagtaattctattgaccaccgaattccaaattctcagagggtacgtttaaactaagtttttgagtattgtgttttgagtaccgacatttgggttttcttgtattcatgctgaatttttagtaatttaaattagacatttaatataaaatatctttgtattcatatttccctatcttttctatcttcttcaaaattagaaatggtaattactgtcttagtagataagttgcttccttgtattggacagtaattatttctttttcttttttttttctcgagatggaatcttgctctgtcacccaggctggagttcagtggcgcaatctcagctcactgtgacctctgcctcccgggttcaagcgattctcctgcctcagcctcccgagtagctgcgattacaggtgcacaccaccatgcccggctaatttttgtattttcagtagagayggggtttcaccacgttggccaggctggtgtcaaactcctgaactcaaatgatttgcctgccttggcctcccaaagtgctgggattacaggtgtgaggcactgcgcctggccaataattatttatttgagtcactattgtttgcaaaaatactaccagttatttcactgcattgtctcccagtaaaaccaccctctactcagctcagaaggcagaacaaattaaattcagatgctcaaggatttctaaatattaatttagaatgaaaagtgtctgttagcatctacttgtattaatcacattattgaaactacaatgatagaattacaaacttttgatgaaaaatgagcctgggcaacatggtgaaactctgtctctaccaaaaaataaaaagttagccaggtatggtggtatatgcctatggtcccagagcctaggaggtggaggttgcagtgagctgagatcatgccactacactccagcctgggcaacagagcaagaccctgtctcaaaaaaaagagaaaaatgatcataacaatcagtttatttaatttatttagaaataaaaataccgtgggtttactgataatcagtatcagggaaatctcgaatccagctacccyataatctggtaaaaggatcaaagtacattacaaagaaggtacttcatattatcaaatccatttatctgccgggtgcagtggctcatgcctgtaatcccagcactttgggaggcaaaggtgggtagatctcctsaatttaggagtttgaaatcagcctagccaatgtggtaaaaccctgtctctaccaaaaatacaaaaaataacctgggtgtggtggcacacacctgtggtcccagctactcaggagactggggtgggaggactgcttgagcctgggaggcagaggttgcagtgagctgagattgcgccactgcactccaacctgggtgacagagtgagaccccatctcaraaaaaataaaataaaattggctgggcgcagtggctcatacctgtaatcccagcacttcgkgaggccaaggcaggcggatcacttgaagtcaggagttcaagaccaacctggccaacatagcgaaaccccgtatctactaaaaatacaaaaattagctgggcgtgttggcacatgcctgtaattccagctactcgggaggctgaggcaggagaattgcttcaacctgggaggtggaggttgcagcgagccgagatcgcgccactgtactccagcctgggtgacagagtgagactctgtcttaaaaagagtaaaataaataaaatccatttttccagcaatgagagcctttgcaaaaaaaaagccttttttttttaaattagagatttcttttgtcagcatttcatttatacctacacctttgtgtagtatcttttgtctcgatttctttccccccagtctgtggtattgttatagaatgcctcgatttttatcagtggtttcttacatagcttttctggggtagctatgactaataaaaggaaaaattatggggtatatagaaattcagggatatttttgtaggtctagagcaggactggaattcaaggaagccatgcctttgttcaaggtttggggtcttaactaagctcacttagctcaactgaaaatgcccatactttaggagccatatgtgttttcacattcagagttttgaattctaggcttttttgcccctaggaaaaagtcttttgttggtaattaacacatttgactgtagcttatgtatgtatcattcccaaatctcaaattcaacacgttaaaaacrtctctcagtcactcctgttttccttatcccagttaaagggataccatttactctgtccctaagccaggaaccccggtgtcatgcaagatwccctctttcactaaccacatcaaatccactgtgtccctcagatctgctctcaccctcacccctttccaaaaatatctgctaccccagcacattgggaggccaaagcagacaggtcacctgaggtcaggagtttgagaccagcttggccaacacggygaaaccctgactgtayaaaaaatacaaaaattagccaggtgtggtggcacgcacctgtagtcccagctactcaggaggctgaggcaggagaattgcttgaacctgggaggcagaggttgcagtgagtcaagatcataccactgcacttcagcctggatgacagagcgagactcctcaaaaaaaaaaaatctgctaccatgtcttagcctagtacttactctcttacctaggcttcaataggtacctgaactgatgtccctgccttcatttattatctctaaacaaaactgcttaaaattgactattgccagtgctcatcttatttcacataggataaagtctacatttgttagtattgaatacaaaggcctcttccctcctctatagctacccctgcccttcagttcatmatcagttgaatactaaaaactttttggattgcatattaaccagtatgaaacatctctcacctccaaatgcttattcattcttaaggagccaacacaaatacatgctatgaaattttccctatttctcctaaaaattagttcctctctcctcctcaggcccgtaacatttttgtatatgtgcctctattataatatatcattatgaaaaaattaaaataattacttgtattaaacattatattcatcatttcagttttgaagccttccaaatgaagtataaatatagttcttgctctcctcacaaatatttttttgaagtttgtattttttcaggatcttcaaatctaagtataaaaaaaagaccttagaaatcactatggtaggaaaatrcacttgttttctttcttagctcttacaaagagakaagtgtacctaaattccactgcagaatgtttagaactgaatgtagagcctgaagtacaggcctgtatcaccagtgtttgcataattcagtatctgtagtggttctgttaagtctgtttctttagccttagaaatacaggaattaaaaaatgaagtgctttttgttggattaaaataacattttattaccaatatttgccatcttgtattctttttcaaaatgtcaatttttaatcctcatcctttaccttttgcatttgaatgcatcatgatgttcattgatgatctaaagataatactggaatattcaaataaactagacttcctctcaatattttagaaaatcagtgcagatactattggagatgaagggttctttgacttattaagccgatttcaaagcaataggatggatgatcagagatgttgcttacaagaaaagaactgccatacagcttcaacaacaacttcttccactccccctaaaatgatgctaaaaagtaagtcatctctgtttctcccccgatttwaatagttctctttgatattcttgtggcttatttctgagaattgaattcccatcataagagatataataaatgagcctgaattcaggtatatctgaaatgctgttatttatacagttcaaacaaggttttttcagttcccttacgtatatctgtgtttttagtccaatgtgctttctactaactatattatactacctccctagttttctttgaaaaatctgttgtggaaaatgtgactgtgagccaggtgtggtggtgcatgcctgtaatctcagctacttgggaggctgaagtgggaggatcgcttgaggtcaggagttkgagactatagtgtgcaatgatcgcgtttgtgaatagccactgcactccagcatgggcaacatagttagaccctatgtctaaaaaatatataaaaataaaatctgattttattaatttatttgagacgagatcttgctgttagccaagctggagtgccaggccatgatcgtagtcagtgcagccttgtcctctactcttgggctcaagtgatcctcctacctcagcctcccaagtaactgggactacaggcacacaccaccatgcctggctaattatttttattttttgtggagatgaggtcttgctgtgttgtccaggctggtctcgagctcctggcctcaagtgatcctcctgccttagcctcccaaagtgctggtattccaggcatgagctactgtgcccagcctaaatataacttttaaaaataaaaatgaggaagaaaggtcgttatacataccttatgattatatataaaacgtcaatgcttcatatctggattaaaaaagaaaaacgaagacagactgaagagaaacatatggctaaggcctggctgagttagaaaggactaaaataggttacttatatttttctatttcagctaccaaaagacttcttgtaccatagaccaagacttgccagcagcacttaactgttagtttactaaatgatttgtatccagggcttggaataaaaaacactgtcctacacaacctggtctgagaaattatgtaagaaaaacagtttgttcaatttctgaaatctagtcacatatcttatagttacattttgagtgagcattaaatagagaaatatagtcaaatctgaataacgtccaagtgggtcatctgaagtactctggggctcattcttccctccagccaataaaaaccacacccatctagccaaagcccatcagtgtcagcgctatagcaggagggcagggcgggtcttgggactggcaaggccgaaaagatctaggtatataataaatgtgcctaggtttttttgttttttgttttttgtttttttttaatctttggctttcttcttctgttcttagcatcatctgttcctgtggtatcccccaacacggatgagtttttagatcttcttgccagctcacagagtcgccgtctggatgaccagagggctagtttcagtaatttgccagggcttcgtctaacacaaaacagccagtcggtacttagccacctgatgactaatgacaacaaagaggctgatgaagatttctttgacatccttgtaaaatgtcaagtatgtctgtatatttttttcrttctgcatacagctcagataccactgaaaacattggtagtgttataattctcattcaggaagggcttattttgtattagagagttattattgtccatcattcagtaaaaaattattgaacaccrattatgtttcagctgctattctaggcatcgaggacacacttgatttttaaaggatcttacattttaggagagacgtgtgtgtgtgtrtatatatatagagagagagtatatgtgtgttgtattaggtaattatgcttgctatgaagaactttaaaggaggataaaggggtagtgggtaagcaaaggtgttggtggtagggggagtgtctgttttaggtagggtggttagagaagacctttctggattgtcatttgaacagagacctgaatgcagtgaagcagtcagccatgtgagtatctagagaaagagtattccatgcagagacagcaagtcccctcttggatataaaagcttagccagttcaaggagtggcagatgtgactggcatgggatgagtaggggaagggaagagttgtacaaaatgaggatggagaagtaatcagggcctagatcatctaggcttttggaggccatgataaagtcgtgttttagatgtattaggaaggtactgggagtgtcctcaaagaggatcctggctactgatggaagaacgtagagtggcaagggtgttagtatgaaaaccagctagaaagattgtatggtgatgcaggcaaaaaatattggtgatrtggactagagtggtaacagtgagaagtagttagcatagggctacattattagctattatatcagttatatattatggttagttggcaggacctcttaataaattgagtagagggtttcagggaaagagaatcaaggatgacttataccttgaataactgggaaatgaatggttctattcactgaaatggagatgactagaagaaaagcaagtttggagagaaaaagcaagagttctgttttagacatgttaaatttggtaaactgttagccagttcaaggaatggcaagtgtgactggtatagacaatgaagtagaggtgttaaataggcaatttgatgtaaaatctggagcccaagggagaagtaaatttgggagacatcagcttatagctggtattaaagccctgggaagaaagtacctaaagaataggacaggaagactaagccctgagcatttcaaaatctactggttagatggaggaagatgagctggcaaagaagcaacagscagagagttggaaggataccccaagggtgggctggggaggggtggggtgtggtgtggtggaaatcaagtaaagagtgtatcttaagcagtgctcaactgtggcaaatgttgctaagaacctgagtcagatgatgacggaactactagatttgataacatggagattatgaataattttgaaagatactgttccagtggcatggtggggacaaaggattgagtggggtgagaaaatgggaagtgtgaaaggggagatagtaaatatagaaactttaatgggttaaatggaccattagctagaaaataaatacaaggcaaatgtggggtttttttttttctttttgggggtgaaaacgtagtttatctacagatggaaatggtcaagtagagaagagtcagtgatgtaggtaagtctggggtaactgaagaacacagtttttgtgtaggtgagagagggaaagcagagtacggatttggagatgggagcaagtaggaattctctcgggctgcttttattttctcaccaaagaaagaagtagtcatcagttaagattggagttggggagcactataaatttgaagagaaaggaagtgggaaatagttgacttagagaaactgaaactagggggaaagtattaagaacactgtgctgtgctaagaacccacctgaggttcagtcactggaagtaaaactagtgagtggaattgtgtattttatccagtcatggccagctgcttgaggcacagagataaatcaagactgctatttttccaggagaatgggattcaggggagagaatggtagttgaagacatgtgccaggaagtgattttaataatggacttaagaatctaggctgtaagaaggaaaataaagaaatgaacacttcataactcattctgtgaggccagtattgccaataccaaagccagacagacactacaagaaaagtactgaccaatatccttcatgaatccagatgcaaaatcaacaaaagcctacaatccaaatttagcagcgcccctgctgtaaaggattttacaccatgaccaagtgggacttattcccaggacgcaaggactgattgttcaacatgtgaaaatcaatcagtgtaacacataatataaacagaataaagggaaaaaacacatacaggaaaaaaatgacaattcaaaactctttcatgataaaamcttaaaaattagcaacagtaggaaactaccagaacataataaaagccatatatgaaacatgtaccgctgacatcatactcaatggtgacagactgaaagctctcctccaagatcaggaacgagatcagaatgcaggtttttgccacttctattcaatgtagtactagaaattctagctggagcaattaggcaaaaaaagaaaaaaaggcattcacattggaaaggacaaagtatcaataaaattgacagaggtaatcaacaagttcaacaaagtagcatgatacaaaatcaacacaaaaatcagttgtgtgtttatacactaacaatgaacaattggaaaagaaatttaaaattccatttaaaatagcatcaaaaagaataaaatacttagaaattaatcactgaggcaaagacttgtataatgaaaaccacaaaacattgctgaaagagatgaaagaaaacaaatggaacaatatcccatgttcatggattagaagacttaataatgttaacatttcgatactatccaaagtgacctacaaattcagtgcaatccctgtaaaaatccaaatgactttttcctcctacagaaatagaaaatatagcctaaaattcatatagaacctcaagggatccccaaatatccgaaatagtcttgagaataaagctttagggctcacatttttttatttcaggttattacaaagctacattaatcaaagcagtgcagtactggcataaaagacagacatatagaccaatggaatagaatacagatcccagaaataaacccttgcatgtgtggtcaaatratatgcaacaggggtgccaagaccattcagtgggggaaaagacagttttatcaacaaayggttctgggtaaactagagagccacatacaaaaagaatgaagttggacccttacctaataccatatgcaaaactcaaagtggrycaaagacctaagcatcagaactaaaactataaaactcaagaggagcatgtggtggcttatacctgtaatcccagcactttgggaggccaaggtgggaggattgcttgagcccaggagttcaagactagactgggcagcatagtgagaccccatctctataaaaaawtttttttaaattaatggcacacacctgtagtcccagctacacaggaggctgaggtgggaggatcacttgagcctaggagttcaaggctgcagtgagccatgatcacgtcactgtgctccagcttaggccacagagtgagaccctgtctctaaagggaaaaaaaaggaaagcctcatggcattgggtttggcagtgatttcttggttataaaaccaaaagagtgarcagggaacaacaacaacaacgtagacaaattggacttcataattaaaaacttgtgcatcaaaggacattatcaacagtaaaaaggcaacccaacataaaatacttggaaatcacatatctgataaaggattaatacccagaatatatagaaaactcctaaaactcaacaaaaaccaacctgattcaaaaatgggcaaagaactggaagaggcatttctatagagataacaagaggctagaatatgaccatgggagccaaatggctaaggccgaagtgaaggatgaggacattcaatcagaggaagtctaggaactaagtgaggaagtctaggaactaagtgcccaagtgttgggttaattggaggacattgaaattatcaatttatgacaggagaaatgaatgagccaggtatgtgtggaggtggcactcacttaggagggcagtaaataactgcaccctctgagggttgtgggcttaaatgttcagggatctatgtcttatcacagtccctaacaatgtagtgcatattcaaatatcagctatcacacttctattcttactcttgagctacaatgccagaaactatggtgtatacttgtaagtgcatgtattttttgacaagtagcatgtctaatataagaatcataatactcaaacttgaaagaaaaattcagagaccaggctcatgcctgtaatcccagcattttgggaggccaaggcgggtggatcacttgaggtcaagagttcgagaccagcctggccaacatggtgaaacccccatctctactaaaaatacaaaaattagccrggtgtggtgacgcatgcctrtagtctcagctactgggaggctgaggctgaagaatcacttgaacctgaaagatggaggttgcagtgagccaggatcacaccactgcagtcctgcctggatgacagagcgagaatccgtctcaaaaaaaaaaaaaaaaaaattcaktctgggctatttcttaacagatttaacagcctaagacagaggcaggcaaactttttctgtaaaaggccagatagaaaatattttaggctttgccgcccatatggtatctattgcaactgcccaactctgccatttagtagggaagcagccatatagatagtatataaacatatgtattgatgggaaaatgaaaatgacttcatttacagaagccggcactgggttacagtttgctgtcccctagcctaagacgtgatttttttaaggtagttcctcatggggtttgtacatatttctaaagatttgttaagttacacagttgatgcctgttagattataaccttgaactgtcatacttagatacagttgaccttgtcttttatccttgtgaccaattataattaaaacagtatgacttaacataatgcacgtactaaaccaatgaagcagctatacctatataagccattttaaaggaaaaattttatgcagtttcaggtttaaagattatttctttcagaaatcaggctgggaactaaagagaacaatataaaaacaaagattaatttctgagaagccccaaataaaagtttacaactgcgttttcttgttgtgactgagagatttaacatagcttggtgctttctttcccacagtatgtcttttaatctctctcataaacttctagggatycagattagatgatcaaagatgtgctccaccacctgctaccacaaagggtccgacagtaccagatgaagactttttcagccttattttacggycccagggaaagagaatggatgaacagagagttcttttacaaagagatcaaaacagagacactgactttgggctaaaggactttttgcaaaataatgctttgttggagtttaaaaattcagggaaaaaatcggcagaccattagttactatggatttattttttttcctttcaaacacggtaaggaaacaatctattacttttttccttaaaaggagaatttatagcactgtaatacagcttaaaatatttttagaatgatgtaaatagttaaccttcagtagtctattaaggcattaatacttctctggacatgcgcgtttgagggtggaggggtcctgtaaggtgcttcatcrtctgtgattactgcttgggatgtgttctttggcagcttgygagattactttacctagtgtttataaagtaggaagttaagtgaatcatagattagaatttaatactcttatggaaataattttttaacatcttaattgacaatggcgkttttttatacataaccatggatgtagtgggaaacaatgttgtttggtaaaaataatgtacttgatcaatgtaaaaaagtatataaaatagtcttaytaaaaatctaggtttttttttcctccatgaaaatctgtttttttaggccaaagtcagtataaaagaaactctacttcttgggctgggcatggtggctcattcctgtaatcccagcacattgggaggctgaggcaggaggatcgcttgaggctaggagttcaaraccaacctgggcaacatagacccccgtgtctatgaaaaataaatcagcagccaggcgcagtggctcacacctgtaatcccagcactttgggaggccgaagcgggcggatcacttgaggtcgggagtttgagaccagcctggccaacatagtgaaaccctgtctctactaaaaatacaaaaattagctgggcatggtggcatgcgcctgtagtttcagctacttgggaggctgaggcaggagaatcacttgaacccctgggaggcagagattgcagtgagctgagaccaagccactggactccagcctgagtgacagagcaagactctgtctcaaaaaaaaaaaaaayagcaagcatgctggcacacacctgtagtcccaactgcttaagaggctgaggcaggaggaccacttgagcccaggaggtggaggctgcactgagctatgatcgtgccactgcactccagcctgggtgacagagcaagaccctgtctctagaaaacaagtatcttttgtgtgttttgggctgtttaaaaaaattatttaaaatggtctcttctgttccataatactgctgtaaaacaaacttttctaagttctaatataaaaacaaaaaacaaaacccatgtggttaggtcaagaacctargacacataaacaaacagaaaacagatgaaaactcacaaaaattaaatatgaaagaaagatgtcagctagaaccttagttgtcattaagctttgtcttccttatcccagatattgaaggcagtttacaaggggatgataacaaagtaactaactaactgtagcaaaagacaagtatgggacagactgggacctggagtaacactggatcacagactgcaaaggcccacgcttggaacaagttgccaacttgtttcactctgcttgcttcagactgtgcacagctgggatgggatctggggatgtggacccctattctttcaaaaagtcattcaggtgatttggatgggcaaatagaactatttctctaatggccaatgttttttaagagtcataayctggaattaattacattaagtgctcagctaaaaaaaaaaaaaaagttctaaattacaacctggattacattatgtttcatgtatactataaggtatgatgtcctggatagcattttaaaaactcaggtaagtttcatggggttcttataagaaaattcagttaagacaatataccaaaccacaacgtaaaaagtttgtgtatacaaactttttgtattatttgtacacaaagtacaaatttgtatttgtacacaaagtacaaactttgtgtattattttgtgtatacaatagttcttacagcctgtaaacattcaacattattccatttaaacattgtttttaacagctgtctaccctgytctgattttcctaaaagcttcacactatataggctgggcacaatggctcatgcctgtaatcccagcactttgggaggccgacaagggcgggtcacttgaggtcaggagttcgagaccagcctgaccaacatggtgaaaccccatctctactaaaaaatacaaaaattagccaggcatggtgatgcacatctgtaatcctagctactcgggagactgaggcaggagaatctcttgaacctgggaggtggaggttgcagtgagccgagattgtaccacctcactccagcctgggtgacagagcaaaactctcaaaaaaaagtaaaatttcaaaaaagcttcacaatataaaccttaattttaatgacatattggctagtcaataaacaagtcttatctcatctcatctcttttctgataacaaacacccgatgtgttcaatttgctttcatatttaagtctttcctgaattgctgtcatcattcaacaacagttgcatgtcgccttgctagctgtcaaagtagacttcatccccaaatggatatctgtaatgaaagaatacaaaggtgaaattttatttaaaaattttttaaaagaatttggttttggattaaaaggcatgcaagcagcattaattccactcacagttacagtctatcacctggggcattcactacttttcagagtcagatcacagttcaaaagacagctctcaccttgggggcatattccccaagtcagtgtgaacatgtcttgtcccaagaggacactttatacgcatggatgttcacaaatttattctaaactgcaggtgtctgtcaggattcatttgttaaacatgtcctctgtgttaaaaatcctaaaatccttttgcatttcttagaaaaaatcacgtttctgatgaaattctaaagatgtttgcaatattaaactagaatatattaacatgtataattttgagacaaggtcttgctctgtcacccaggctggagtacagtggctcgatcataactcactgccacctcacgatcctcttgcctcagccctccaagtagctgggactacaggcgtgtaccaccatgcctggctagttttatttttagtacatagccttgaacaactgarcttaagcgatcatcctccctcaaccttccaaagtgctaggactgtaggcatgagccactgcacctggcctaaaattacattgttacaggcacgtaagtaacacttcctggatccaaaaatgtgtattctgcatttcaacaactgaacttaagcgatcatcctccctcaaccttccaaagtgctaggactgtaggcatgagccactgcacctggcctaaaattacattgttacaggcacgtaagtaacacttcctggatccaaaaatgtgtattctgcatttcatattaaaataaaaaagcaagtgcttgggatacaaatatctgcatgaaaatttaaagactttattcctgactggtatcacttttagtaagcagttgaacataacttgtagtgtgaatatggttaaaacaaaggacacctgatgtctgtgaagtctgctaaggacaggtacaaaatttatgcattgctttttaaaaagtttaaaatgaggaatgcttttgataatcagaaagrctaatgtaaagtgctgactgatgtcctgtctgcagttaaggaagacacccaactctcttcttcctcatcatggtattctctatgtatagatctctaaaaatgcaaacttcctatggacaagacaatatgatttgctataatatgaattaagatatggtaatatctaatagtctccactgctaggattctgagtaacacaaaaaataggttttataaaaagcccatgcacttcaattggtgggggaaaagaataaagtcattttcagtcgactgactctgtaaaacagattaccaatataacaagctatgttatctaaattgccctggcagtcttcagttttctctaagtaaacaaagtaaaaggaacaataaggatgcaggcgtagtaatagctgtggaaaagatgaaactacagcyacagtgacctgtgggcagcctgcgtagagataagctgaggtgtcagtcagactgatcctggtaacgatactccatggctgcatgaagatgctggaggcatcaagtgggtggccttaactctagtggattcactaggcaatgtaaattggttagtgggttcccgtaagtgcctgtaacaataaaatttctttttcaatgtccccaattcaaactggcctccttaactatccagaatcagtgatgcctgtcatctgttcatcttaaaataaacacttcttactttatgggatgtaaatatcaaagagaagatgaaatgaaaagcttttacatatataacgtgtttgttaattctaattgtcagtaaaaatgtgaatgttgaagttgaaatgtgaatgttgaagttggcacctttgtagtaatcagaattcttgcagagaagagaragagagtraagagtatactttacaaagctcgaaggagacttgaggctgtcgtttgtgctggtgttcctctagccacaggggctgctgaccggatcctgtccacgtggtccagccacacctcttgcggggctgtatgtgctgccttggtctgggctgcctgcggcttcagacttgagctgggccttttccgctgcgggtgaaccttctgtattccctgatgtgtcttggccagagacaggcttggccgactggctgctttcagtactgctttctttcggtgtgccttcccccaggattccacctgtctccttgggctttgtatccaaaacaggtgatttatgctataaagtacaaaattacattttaactgtttaatgtaatgtgaagtcttagtaatcaaacatatctaaaaagttcccacccaaatccrttgtagcaagctccaaactctttcaaatccagggtccagtgctgggttataattatataaatgttattatacctcaccaaactccacagtactcccacagaggagtgggaacgcttagcgcatatactgggtggtctagtggcccagcttagaaggggtcaagagaattggtcatcagtattgtcaacttctcttgcctggtgagaataattcatttgacaaatatttcttgagcatatattaagttctaggtgttagggatacagcaggaacaaaatacataaaactgttctcactggaacttatatttaggttagaagaaaatcacacaagtgtgatatgttgaattaaagaggctatgtaaaaaaagcagagaagagatgagtgctgaatgtgggtgggctggcagggtcaaattacagtttaaattagggtggtctgaaaaagtgatatggttaggcatggtggctcacacctgtaatccyataactttgggaggccaaggtgagaagactgcttgaggccaggagtttgagaccagcctgggtaacagcaagaccccatatccacaaaaaataaaaaatattagccaggcatggtcgtatatgcctatagtcctagttactcagaaggctgaggcaaaagaatcggttgagcccaggattttgaggctgcaatgagctatgatcactgcaccccagccttgaccacagagtgagaccttgtctccaaaaataataaaaatgagtaaaggcctgaagaaagtaaccatatgattgatatataaatgaagactgtagaatgaacagcaggtacaaaggctctcaagttcaaggaacagtcaggagcccttatggctaaagtagagtaagcmcggagggagaaraggtgaccagagaggtagtggatgtgggggaaggggagaccaaggaggctyycaggccattgtaatactggctttcccctcaagtgagataggaagtcmctggaagacttytgagataggtgacaggtaattactaactataaaagctggaaggaccatcttaagktkttttttttttttttttttttttttgagacgacgtctcactctgtcacccaggctggagtgcaatggcacgatctcggctcactgcaacctccgccccctggaatcaagcaattctcctgtctcagcctcccaagtagctgggattacaggtgcataccacatcacgcctggctaattttcttgtattttcagtagagatggggctttgccacgttggccaggctggtcttgaactgcagacctccagtgatccgcctgcctcggcctcccagtgctgggatcacaggcgtgagccgccgcgcctggtccatctttctagatacatgtagatatgtttatttttatatgaaactatgggaagggattctataatttcccagattctattatgctcataactgtttcaaaggtttaacagctgcaatttaaacatttcaaatgacaatacaaattcctct

SEQ ID NO: 8818 - DNA, 45836 bp, Homo sapiens
gccacaagatgagccagtttactgatatggcagatgtcagctgatccatcaagtgcagggtctgggaaatatctcaatctctgatcttaggttttacaataatgatgttatccccaggagcaatatggggagggtcagaatcttgtagcctccagctctatgactcctaaactgtaatttctaatcttgtggctaatttgttagtcctacaaaggaggcaatctagtccccaggcaagaagggggtttgttttgggaaagagctattactttttttcttttttttgagacaagagtctcgctctgtcgcccagactggagtgtagtggtgcgatctcaggctcactgcaacctccacctccagcaattctcccgcctcagcctcccaagtagctgggattacaggtgcgcaccaccacacccagctaatttttgtatttttagtagagatggggtttcgccatgttggccagactggtcttgaactcctgacctcaagtgatctgcctgccttggcctcccaaaattctggaattacaggcgtgagccaccgtgcctggccagagctgttatttttgtttcaaactataaactataaattaagttcctcccaaagttagtttggcccactcccaggaatgaacaaggactggttggaagcaagatggagttggtgaggtcagatctctttcactgtctcagttataattttgcaatttcaacttaggaagaaataaaatacagctagcttgtgggtattcgataggtacacaaattttctacctttcaggcatgcagaagggaattctgctaaaagcatgccacagtctctctctttttttttttttttttcagatgaagtctctggctcttgtccccaggctggagtgcaatggcatgaccttggctcactgcaacctccacctcccaggttcaagcggttatcctgcctcaacctcccgagtagctgggattacaggtgccggccaccactcctggctaatttttttattttcagtagagacagagtttcaccatgttggccaggctggtctcgaactcctgacctcaggtgatccgcccgcctcggcctcccaaagtgctgggaatacaggcatgagccaccatgyccggcccagtctcttctttagtttactttcatgttgaatttcacacattttagatattagataagttgtgttaagtttaaaactaggaaaataagctatttcttagagaccagttcaagttcatggttaaaaatattcataaaattgtgtattccaccttcatcactgtcagggagaagagattctcctggacatgaggtatggaattcatttcttttactgcagtacattagatagtaagcatcaaggctgggtgtggtggctcacgcctgtaatcccaggactttgggaggctgagggggtggatcacttgaggtcaggagttcgagaccagcctggccaacatggtgaggactaagctctgatttttttttttttttttaatcttcctatctaaggggactggggagttatgccttacaaaccatgacttctcatcagatgggttttatttaatcatgtatatcgtgacttactttccaatctgactctggcataacaagaaaatcaaaatgttttaccccaaaatacatttccttgccataccttgaaattgccctgcaaagtcttttgtgggaaaaatgcacatcctatagagaatcccttttccctttgttttccttcctttctttccagatccaggagataatcaactaagaagcaggcacctttttaattcctgtaagaaacattttacaacctgctctctctgaagtcttttatctgagcgcttcctctgcccaataaaactccgtctccacaatcttctatctaaacctgaacattccctttgatcccaggtcttcagacaaactcaaccaattgtcaaccagaaaatgtttaaatttacctatagcctggaagcccctgctttgagttgtcccggctttctaagccaaaccaatgtatttgttaaatgtatttgattgatgtctcatgcctccctaaaatatgtaaaactaatctgtaccctgaccaccttgggcacatgttctcaggaccccgagggctgtatcacaggccatggtcactcatatttggctcagaataaatctcttcaaatattttacagagtttgactcttttagtcaacaatggtgcaaccctgtcttaaaaaaaaaaaaaaaaaagatcagccggctgtggtggcatgtgcctgtaatctcagctactcgagaggctgaggcaggagaatcgcttgaatgcgggaggtggaggttgcagtgagtcaagattgtgccactgcactccagcctgggcgacagagcaagactccctctcaaaataataagcaccagaaattgttatatttgcttcagtaaatagctggttacatatgtccttttttgtttgtctccacatgtcttctgcatggggtgactaggttctttgaggttcacataaaagagaaaatgagaggactgaagtatctatactcttggggtccatctcatttggcagtgcaaggaaggggaattggggtggatgggtagtgcagaggttcttaattattcccagggaggacatttagaggtctgttccaattttatgtgtgtgtgtgtgtgtgtgtgtgtgtgtgtgtgtgtgtgtgtgttgcctcaagttgagagattatttctatttttaaaatgtttaatttttctattgcattgtgttatattgacaaagtcttgctcactatagcctagaactcctgtgctcaaatgatcctcctgcctcactcagcctcccgagtagctaggactacaggcacatgccacaatgtggggctaattttttttatagagatgggtgtctcactatgttgcctaggctggtctcaaactcctggcctcttaacagtcctcccatcttggtcacccaaaatgctagcattacaggcatgagacaccacatctgcccccaaattttatttttaaaatgtttacttttccaaaattgtaatgtcgacggagtcaaactctgtaaaatatttgaagagatttattctgagccaaatttaagtgaccatggcccatgacatagcctcaggagatcctgagaagatgtgcccaaggtgtttgggctacagcatggttttatatacattttagggagcgtaagacatcaatcaatacatgttaaatatacattggttcagttcagaaagatgggacaactcagaggtgggggtggggggatggacctgctgtcacattggtatcttactgctacaaagtgtgtcagtgttaaggtctctgttttttttttttttcctgagacagagtctcgctttgtcacccaggctggagtgcaatggcatgatctcagctcactgcaacacccaccttccaggttcaagcgattctcctgcctcagcctcccaagtagctggcattacgggcccaccgctatgcctgcctaatttttgtgattttactagagacagggtttcaccatgttggccaggctggtcttgaactcctgcccttaagtgattcacctgccttggcatcccaaagggctgagattacaggcatgagccactgcaactggcctcaggtttactttagaatgcccttggctgagaggatgggcctattcagttggttggggggcttagaattttattttcgttttatagtaagaagccaaaggacacaacagagtgaaaaggcaacccactaagagggagaagatggggccgggcatggtggctcatgcctgtaatcccaacactttggaaggctgtggcaggaggatcacttgaacccaggagtttgacaccagcctgggcaatacagggagaccctgtctctaaaaaaaaaaagaaaagaaaaagtgggagaagatatttgcaaatcctatctgataaggtggttaatatccagaatatataaggaaccaaaacacaacaaaaacccattaaaaaatgggcaaagccaggagttcaaggctgcagtgggccatgatcatgacactgcacttcagcctgggtgacaaagcgagaccctgtctcttaacaaaacaaaataaaacaaacaaaacaaatgggtaaaggacttgaatagacatttctccaacaaacatatacaaatggcatgaccaataagcacaagaaaagatgctcaacatcactggtcattagcgaaaggcaaatcaagaccacagtgagatacctcacacctattaagatggctactatacaaaaataaaaagatgtcagtggagatgtggggaaattggaacttgtgcactcttggagggaatgtaaaatgttgcagccactatggaaaagagaatggcagttccgccgggcgcagtggctcatgcgtgtaatcccagcactttggcaggtcgaggtgggtggataacgaggtcaggagttcgagaccagcctggtcaacatagtgaaaccccatctctactaaaaatacaaaaattagccaggcatggtggcaaacgcctgtagtcacagctactcaagaggctgaggcaggagaatcgcttgaacccgggaggcagaggttgtggtgagccgagatcgtaccactgcactccagcctgggcaacaagagtgaaactccatctcaaaaaaaaaaaaagtacggcagatcctcaaaaaattaaaaatagaattactacataatccagcaattccacttgtgtatatatattcaggagttgaaagcaacagatatttgaacatctgtgtgtatacccaaaagggttaaaaaacagatatttgtatatccatgtttacagtattatttcacagtagccaaaagtggaaacaacctgttatccattaacagatgactgaatgaactggtatatacataaaatggaatactattcagccttaaaagaaattctgacacgttaccacatggatgaaccttgaggacattatggtaagtgaaatcagttacaaaaagacaaatgctgtatgagtccttatatgaaatacctagagtagtcaaattcataaagacagaaagaatggtagtcgctgggaaggagggaggggaagaatgaggcgttaccacttactgggtacagagtttcagttttgcaagatgagtgctggagatggatggtggtaatggttgcataacaatgtgaatgtatctaataccactgaattgtacctttaaaaatggttaagatagtaaattttaccatcttcacagtttcccgagattgcaaggccagcagttaaagacaaaaacaaaactatttccaactgccctacagtgtgcagacctttcccttgtcctgccctgagtagaactacagttgtcattcgtgatcctccctttaaaaaattatgcttgtggctaggcgcggtggcttacacctgtaatcccagcattttgggaggccgaggcgggcggatcacctgaggtcaggagttcgagaccagcctagccaacatggtgaaaccctgtctctgctaaaaatacacattagctggatgtggtggtgcgcgcttgtagtcccagctgctcgggaggctgagagaggagaattgcttgaacccgggaggcagaggttgcagtgagccgagccgagatcgcgccactgcactccagcctgggcaacactgtgagactctgcctcaaaaaaaaaaaaatcatgcttgcgtttcatggcgaatgttacacattcaaacttatcaaatatattaatagtaagaaaataggtttcctatccgttgtatatatttgagttccaggcgagatttccttcgcagaaagagttccgcagatgaaaagtaaaagaaaatccgcggcgaaaataacccgcgcgcagaggccggtcccgctactagccccgcccaatcaacgaggccaatcagcggcccgcaacgggggagggacacgcagccgtcagccgaacaattcgatgacgaggcccaggaagcacgctgaaaccctgggcggcggcaagctgtgcgacctcttctgcggccggcctgggcaggtgtcttcctcgagaggcaggcaggggatcccggacgtgagtccgtgcagttgggtgtgttgtgcggcgggtggggcgggttacccgccgttacgccctggcgggtccagcggactcgcggcgcagacgctggggaggccgcaggcgcgacccggggcggggaccgtgctagctgcgtgcgtccgctgcggcctgtgggtgccccgggctcctacctcagctcccgcgccggcggctgcctgtccgccgcggttgcgcgcgttccggggaggtgcttggcccagagagcggcctacggagaaggcacagcgagggcaaagcgagacctgrgcgcacgttgaattctgttggctttggttatctctgaaaactttaagcataatttgaataaatgctgtcagcagaatagctcggatttagttgtagttaattttctaaaacttcaaatctgtgaattaacacagttaacaacaacaacaaaaacggacacaaaacaacctccaaawtggattttttttttttttttgagacggagtcttgctgtgtcacccaggctggagtgcggtggtgctatctccgctcacggcaacctccgccttccgggttccagcgattctcctgcctcagccacctgagtagatgggaccacaggtgcgcgccaccaggcccggctaatttgtaaattttatttgtagagaaggggtctccctgtgttgtccaggcttgtctctgactcctgggctcaaaggatcttcccatcttggcctcccaaagtgctrggattacaagcgtgagccattgcgcctggctccaaatctgatttgagtgtaaaaagttagacacaccataagctgtaggtttattactgggtggtgaaaaacaattcaggttttctttataatagtgattatgaagtgttcttcccagactagctttatcgtcatctgggaaattgttaaaaatgcaaattcgcaagtttgagagccatggttccaagaaactgcataagcatacgaaataagttgcagcctcccgacttataccctggtacttctagtctaaaacaggatttgactctactaatccaggttagtcttgcctttcccrttactcatgtgctttcgttgaaaccaaagactttttcttttgtgcccatttctactcactgcctggccgtctgcacgacgatctgtgtttcctggtagttctccagtctagtagctactataaactactctccctatttcccgctctgtggagatgtcgttccaacaggtcctctccactctaagaccctatcctctcagagaagcccctgagagccattagtacttttgccctggagaggcagtttaggtagagccagtctgggttctaccacttactagcytggtggtcttaggcaagttactttgtgtgatctgtaaaatgaagatgagtgaagataagagtactacttccagtagttttgtgaggattaaattaatgtaacagtgcttagcacatagtaacaaaatattagctacttttttttttttagacggagttttgctcttgttgcccaggctggagtgcaatggcgcgatctcggctcaccgcaacctgcactctctgggttcaagcaattctcctgccccagcctcccgagtagctgggattacaggcatgcgccaccacgccctgctacttttgtatttttagtagagacagggtttctccatggtggtcaggctgggctggagctcccaacytcaggtgatgcgcccgccttggcctcccaaggtgctgggattacaagcgtgagccaccgtgcccggcctttagctactattatacatattataatttaaaaattattagtaccgaagcctgagacaggagagaaatggtaaaaatagtagggactgcgggagagagaaagagtagtgtcccctgacaagtactagaatgacataggtgccaccattaaacgaaactagctaggatggttactttcgattaacactttgctactcaagagtgtggtctgcggcatcaccaggagcttgttagaagtggagatctcagacctacctcagatttactgaatcagaatcgtttttttttttttttaacaaactcttcagcaggtttagatgtagctttgtttggaggaagtgtgagattcgttttaggatttctcaaggagttccagccttcaatcagtgaccatggggatctggcaggagggcttgaatttctagctgattcttctattctgtcttaccctcctgtcttccatcatttctgcattgctaatctctatccctggagaaatctatggaactgctggttattactgtagaaagtaacatagttgccartagtacgactttgtggatgtcacagtcaaaactcaactgcctggctggcacagtggcwcacctgtaatcccagcactttgggaagacaaggcggcgggcagggggatcctttgagctcaggagttcgggactagcctgggcaacatagcaagaccctgtctctataaaaaagaaaaaaaaatctcaactgcttgacaggctttttattcacttccctttgtakaatgcctcctgtagtaccttttttcccctccaaatctccgtttcccccatcctaacctcctcacagtgttagaaatgcaaattactcttaatttctctgtccacttcatatcatattataatatgaaatctgtcagtttctctttttactttagaaattttgtcttcatccatcttcattcatttctatttatggagtatataacctcattgcctatgaagaacccttcccgtaaccttaatttcatgcactcccatcttggagcctctctccagtttacacactccctttgtcacctacttcttaaccacttagagaattaggcttctcactgtcattctctgaaaggtcataaatggccaactaattaaccaatccaatggcttttttccagactttgttcctctccacttctctgaagtattgaatacgcttgataccactttcttgaaattaagtccctccttagtttttgcccattgcatattttggcttgtcttctattgccctgattagccttcactctcctctctggtatttgcttcttccatggctttcttccttagttgaactcttaattttttccaataaagtatacagttattcagtatttctaagtatctccagagcataacagtgattttagtgttttttgtttgtttgtttgttttttaattgagtcagggtcttgctctgtcacccatgctggagagcagtggcgtgatctcggctcagtgcagcttcaacctccccggctcaagtgatcctcccacctcagcctctccaagtagctggaaatatagacgtatgccaccacacccagctaaattttgtttcaagttttgtagagatggaatctccctaagttgcccaggctggtgtcgaactcctgggctcaagtgttcctcctgccttggcttcccaaagtgctgggattacaggcgtgagtcgccacaaccggccagaaactattgttctatttattttgtgcagagctttggttgttcaggcaggagggtaaatctggtccctgttactccatcttggccaggagtaggagttggggaagtgctttgggagtatagagtcccccctttacccttggagtatacattctaagatcctagtaaatgcctgaaacttcagatagtactgaaccttgtatatattctatgttatttcctatacatctattcctctgctaaagtttaatttatcagttaggcacagtaagagattaacagcaataactaataaaatagaaaaattataacaatacacaataataacagttatgtastgtggctggaattttttcacttgaggtgcgacagcaaaactagcatgaatttctttctcctcctgtacaatttcatggatacaagttttgttcttaacatagatcttagcaacctcatcatatgagcttttttttctttaatttttttttttcttttgagttggattctcactttgtcacccaggctggagtacggtggtgtgctctcagctctctgcaacctctgtctcccaggctcaagcgattttcctgtctcagccattcaagtagctggcattacaagtgtgtgccaccatacctggctaattttcatatatttatttatttatttattttgagacggtgtttcactgttgttgcccaagctggagtgcaatggcgtgatctcggctcacctcaacctccgcctcccgggttcaagtgattctcctgcctcagcctcccgagtagctgggattacaggcatgtgccaccacgctcggctaattttgtatttttttgtagagatgggatttctccatgttggtcaggctgatctcaaactcccgatcttgggtgatccgcccacctcggcctcccaaagtgctgggattataggcatgagccactgtgcctggcctatttattttttgagatggagtctcgctctgtcgccctggctagagtgcagtggtgtaatcttggctcactacaacctccgcctcccgggtttaagcaattctcctgcctcagcctcctgagtagtcaggactacaggtgcttacaaccatgcctggctaattttttgtatttttagtagagacggggtttcgccatgttggccacgctggtcttgaactcctgggctcaagtgatccgcctgctgggcctcccaaagtgctgggattacaggcatgagccaccacgcccagccctttattaagttgagaactttcactttttcacttaaaggaagcactttatggcttctctttgacatatctgaattgccagcatcgttactactgtgctttagggccattattaagtaaagtatagattccttgaacacacgcactgagataccacagcagtcgtaacccagatggatactaagtgactggagtgtgacacctacagtgtggacatcgtcccatgtgggatggaacaggacaggaagagagttcctcacactatccagagctgtgcataattgaaaacttaggaactgtttacttctggaattttccatttaatattttcagactgcagttgactgtgggtaactgaaacctcagaaagcawaaccgtagatggggttaccactgtagagttactgtgttaccttgatccaaaacctttacctgaatgattcctttaaccattcccggtaggctttctctgttaaagctgctgtaccaaatccaggggtcagtttgctgccctctgatcgcctgacctcttagcggcattcaacatatttgtctgctctctcctttcttcacttggcttctgaaattccaacctctcttggttttcttcctgcctcatagcactcactagaattatctcttgctggttcctcctcttctttctgatccccgaatgttggcttgcccaggactcagtcttttgtcctcataataaatcttctggtgatcttacccagatcatctcttttaaaccccgtctacattctgatcgttctcaaatgyagtcccactgctctccttagcttcatcctgcatatttataatctctacttggacatcagtggacacttcagatttactatatccaaacaaaactcttgatctttcagaacttgcagtcttcttcagtcttttcccttctcccagttgccctggccacaaacatagaaatcgtcccaaatcttcacttgtccttaccgacatccaaattttcagcaatttctatagtgtatttctgtattagagtagcaagagatgttataagaaataaacccctatatctcagtatatgccataaatgaaattaatttttgctcacatgaaagtgaaaagctatattcccacttagtgggtggccttccaggtggtcatttaggggcccaggtgcctgcatagtttggctgccctcctccagggctcagtgtcctgggaattccctggttgggagagggcagctgggaggttttcatgggccagacttggatgtggtgcatatcccttctatccgttgggttggctagaacttaactattacgtggccatacttcacagagaggctgagacatacagtcatcatttgtccagaaggaagaagaaatatgcctagtgacctattagctggtcattttgccagatgtagtagggtctacctacagattttaaaagtctgaccatttgtcatcacctttgctgctgtctttagctcatgtcaccttcatctctgaagtggatgactacagatcttcctaacctcctgataatcttccattctaatctctacatagtagccatagtaatgtcttttagaatgtaaaccagattctatcacgcccctatttaaaagcctcaagtggcttcttgttacacatagagtaaaaaccacactctttactgtggtctaccactccctccccgcctccccgcctccccgcctcccwgcctcccagctcattcccaagacccagctgttctggcctcctttctgttccttgactgcttcagcttcttctccactcagggcttctatacttgctgtgtcttctctctggatgttctccaaatcttcctaagattatcttatttttctccttaaatgttcttgtggttatctgcttgcatgtaacaaaccactctaaagtgtaatgcttttttttttttttgagacggagtctcgctgtgtcacccaggctggagtgcagtggtgtgatctcgcctcactgcaacttccgcctcccaggttcaagtgattcttctgcctcagcctcccgagtagctgggactacaggcgcgtgccaccatgcccggctaattttttgtatttttagtagagacggggtttcactgtgttagccgggatggtctcgatctcctgaccttgtgatccgcctgcctcagcctcccaaagtgctgggattasaggtgtgagccaccatgcctggccaagtgtaatggctgtaaataacacttttattactgctggtgatgttgtggttttatggggtgtgatggggctcagctggatagttcttttattctacatgatgttggctgggtcaccaagtcagtcaccagaggttggactggaaccaccaagatggctcacccacatggctggccattgatattggctgcaggctgggagctcagtgtgcccctgcacccagcctcttcgtgtgacttggccttcttacaaggtggcagctggcttccaagaggggcgtgttcccacaaacatatgttctgtcttaggattctccagagagacagtgagggtgggaggatggatggatgagaggggatttattaggggaattagctcatatgattatgggtgccgagaagtaccatgataggctgtctacaggctggagatcctggaaggccagtagcctggctcagtccaggtgtgaaagccttaaaaccagggaagcctatggtgtaattttcagtctgaggctgaaggcctgagaacctaggggctgctggtttaagtctgggattccaaagcctggagagcctggagttctgatgtccagtgacaggagaagaagggtgtccctgctccaggagagaaaagaaattccttttctcttttttgttgtattagggtccccagctgactgaatggtgctggcccctacagagggtggatcttccacactcagtcarctgactcacaaaccagtcttccctggaaaccccttcagacacatcagaaggaatgctttgcagttctctaggttttccttagtccagtcaagttgacacttaaccatcacatgttccaaagtgaagtagaagcaggcgaccctcttgaaggctaggcctagaaccatcatagccccacttcaaccaaaggattttggttcagtagtcacagggccagcccagattcaggagagggggaaatacactccatctttccgtggggagagtaacaaagcatttgtgaccgtcttagatcttaggggcctaccctgaaatacccagcatcgcctaatccatatgtaccactgtcttgctttatcttcttaggatttatcactatcttgagttacatgtttttgtttttgtttttttgccaacttactgtccttccttcccccctagaatgtaaccttcctgaagaagacctttgtctgtgtagactcctggtatccctgtaacttaagacagtgcccagcatggtggctcatgcctgtaacctcagcactttgggaggccaaggcgggtggatcacctgaggtcgggagttcaagaccaacatggagaaatccctgaccaacatggagaaatcccttctctactaaaaatacaaaaaattagctgggtatggtggcacatgcctataatcccagctacttgggagggtgaggcaggagaatttttgaacccaggaggcagaggttgcagtgagccaagatcgygccattgcactccagcctgggcgacaagagcraaactccgtcacacacacacacacacacacacacacacacacacgcaaagacagtgcccagtatacagtaggtatttggtaaatgttgaacaaatgaatgctgaactcgttccacaaccatattctcattatgaatttctttttaaaattaacatcaccatttttgttgctggtaggccaaggtctgtagaattgatcttcagagtgtgccacatgtgttctttctggttttcttgccaccactcttttaggccaagtaccacatcttttttctgcttcagcctctttgttggataatgaatccaggttttcctcctcctgtgcgcttagtgctggtggtggtggtggttgttgttgtttttgagaccgagttttactctttcacctaggctggagtgaagtggcacgatctcggctcactgcagcctccgtcccccacccaggttcaagcgattctcctgcctcagcctcccaagtagctgggatttacaggtgtgtgccaccaygcctggctaatttttgttgttgttgttkttttattagagactgggtytcaccatgttagccaggatggtcttgatctcctgacctcattatctgcctgcctcggcctcccaaagtcctgggagttagtcgtaagcttttttcctcagcagtgtcatcaccacccacccacctctacctctcaccgtatccatcctcgcaattgcaattgctgaagcatacactttgccctctgcctctcccatcttgagcacttaagatgttacccatacctcggattcccattcctgtgcagtctttccactttctagtttctccagtcggatgtgttttttttttttttttttgagacggagtttcactctggttgcccaggctggagtgcaatggcatgatcttggctcactgcaacttctgcctcccaggttcgagttattctcctgcctcagcctgccgagtagctgggattacaggcatgcaccaccatacccagctaattttgtatttttagtagagatggggtttctccatgttggtcaggctggtctcgaactcctgacctcaggtgagctgcccgcctcggcctcccgaagtgctgggatcacaggcgtgagctactgcacctggccagatgtgctttctttatcctttgaacctctaaaatccttgagtccttgctatggctttatttgcatttgctgcttaacaaacatttactgaatgtctttcacgtgccaaccactgggctgggtgttgaggttggggagatggagggacaagatagagaggccagtgggaaggtgacttcagatctaggtaagatactatctttccctagagaagttcacattaacagtggttttctgtcttggctacacattagaatcacttggggagcttaaaaagatcgaagtgcctgggtcctaatcccagagattctgatttaatggttttgggatatggccaaaacattgggagtttyagaagctcctcgggtgattctaatatggagccaaggttgagagctattgtgctaatggaagagacagaccgataaatggctaatttcattgcttccaatgccagaagaatatacagggcacayggggaacaggagtatttaatttagcctagagtgatttttattgtacaactagaccgtaagctgtttatgggcagggcccagggctttgtcatcttggggttctcttgcctgattcttatatgtagtaggtataagataggctgcccaacagaactttcttcgatgataaaaatgttcaaatgttctgtatccaccctgtccaatatggtagccactacccatatgtgactattgagtgcttgaaatgtagctagggggaatgaggaactgaattttaaattttatttaattttaattaaatagctacatagaggagttactaagtgtttaaattatttgactgtttatgcaggggcttaggtaaggcaggttattttctctgaatggttttgaagtttagtcactgcatttgaatcgtaaattcccacctttctttctttttttttttttttaaaggcagagtctcactctgtcacccaggctggagtgcagtggcgcgatctcagctcactgcaacctctgcctcctgggttcaagccattctcctacctcagccttctgagtagctgggattacaggcacacaccaccatgcctggctgagtttttgtgtttttagtagagatggggtttcaacttgttggccaggctgctctcgaactcctggcctcaagtaatccgcccagcttggcctcccacagtgctgggattacaggcgtgaggcactgcacctggcagtttcccacttttcttatttctcatttgttaaaaaaaaacagggggggccaagcgctgtggctcatgcctataatcccagtactttgggaggccaaggtggggtggaggtcgggagttcgagaccagcctgaccaacatggagaaatcccatctctactaaaaatacaaaattagccaagtatggtggcccatgcctgtaattccagccacttgggaggctgagggaggagaatcgcttgaacctgggaggcagaggttgcagtgagccgagattgcgccattgcactctagcctgggcaaaaagagtgaaactctgtctcaaaaaaacaaaaaacccaaaaataggggggagattcgttaaaatacctgtttttaaattgactttattgagctataaatcacatactatataatccacccatttaaagtgtccagttccaccaggtgcagtggctcatgcctgtaatcccagcactttgggaggccgaggtgggaggatagcttgagcctaggagtttgagaccagcctgggcaatatagtgagaccctatctctacaaaaaagttaattaattttaaaaaattagccaggtgtggtgtaagcttgtagtcccagctactcaggaggctgaggtgggccgatcacttgagtctgggaggttgagtctgcaagtaagctggtattgtgccactgcactccagcctgggcaacagagggagagaccctgtctcaaaaaaaaaaaaaaaaaaagtatacaattcaacggttttgggtatatttgcatgtatttgcaaccattattataattttagaacatttttcattacctcaaaaggaaaccctgtaccctttagctactatactcccaaaccttcagccttaaccacctgttaatctactttctgtcttaatagatttgcctattctggacatttcatatatatgtactyatataatgtgtggtctttcatatctggtttctttcacataaygtagcattttcaaggttcatatgtgttgtagcatggtgtcagtatttcatccctttttatggctgaataatattccattgcatggctataccagttttatttatcagttaatggaaatttgtttgttgttgttgttttttctgtgatgggggtcccactctgtcacccaggttggggtgcagtggtgtgatcttggctcactgcaacctctgcctcccaggctcaagcgatccacctgcctcagcctyccaaggggctgggatcactggcttgcgctaccacgcctggctaattttttggttatttttttcattacctagcctggtcttgaactcctgagctcaagtgatccacctacccaaagtgctgggattacatgtgtcagccaccacacctggccctgttgatggaaatttgggtttttcccaccttttggctattacgaaaaatgtggctctgaacattcatgtacaagtttttgtgtggacatatattttcatttcttttgggtatatacctagcaatggaattgctgggccatatggaaaaatacctattttcttatatcagtgagcatattatgcatatatgcatttttttaatatatgaacaccaatttatttttattttgtgtaccttcttccttagatactgttcagaaagtgttatcttaactctagaaggaagtagttttcattacaaaacaatctggctgggtgcaatggctcatgcctataatcctagcactttgggaggccagggtgggaggatcagttgaggccaggagtttgagaccagcctggataacatagtgagaccctgtctctactaaaaattaaaaaaaaaaaattatccaggtgtggtggcacacacctgtagtcccagctagccaggaggacctcttgagcccaggagttggaggatgcactgagctgtgattgtatcactgtactccagcctgggcaatagagcaagaccctgtctctaaaaataataataataataataatawcccaaaacccaatttatttaaaaaaataattctatttcattatatatattaaaaattgttttagccttatacaggatgctgtgttctttgctcctttgtgaatgtctgttgctggtagctggttatgctcatgatgatgactggattgaccccacagacatgcttaactatgatgctgcttcaggaacaatgagaaaatctcaggtattaaaaaaaattcgtgcatgtgtgtgagaccttatcagtcccatgatgsaaacagtctagctctgttgttttgcacagagctatgagggtcatggatccatgattagcaattatgcagaatattttcttgacactgttaatctaaaattatttcaaacctacctggtattgaatttgaatgtaaagcccttgaagtagcaaaataatatgattttagttcttagtgtgtacatttgaaactttttttttgtggttcagtacaatttaagaatataacatgcagagtcatgaaatgatgaagtcagaatcttagtcttcattaaccaaaggctatttttgtaactaaactataaagaaataaaatgtttctatactctgttttaggcaaaatatggtatttcaggggaaaaggatgtcagtcctgacttgtcatgtgctgatgaaatatcrgaatgttatcacaaacttgattctttaacttataaggttagtttttttattgataaattttatatttttatattatgttaaatcgctctatattcttgtctctgctgataaatttgtatttctagtgtttccgtgtaccgtatgatttttatatrtcaaatttttctttggatactctaaccttggtttcttattagttattctagccttggtttttctagtagtaccttgtattttcctgtaataacatwgacatctctgtgttgtaagtatttctttaccagactgcagacttcttggtgcaaggaatacgttttattgatcttaattctctgtcacctrtcacagggctgaggcatagtaaactctcaacaaatgtagcaaatgaagaaatgtgtctattaycagcttatacgaataagagttactcttaagaaggattattataatttagtgtgtaatagctattcattccttcatttatccaatcctcttaaaaaaatgtagctgaagagtttacacaaaaataaataagtcaagggatgtgaatgtagtcgttatgtgctgtgggagccaccctcggttggctgcgtaggcagggtgaactggtagcagtgtggaggtaaggaggtgaggcctggaatggagaaggggggtgtcagtgagatcagtggaggctgcagaggtccagcaatgctgaaggtctgaaatgaggcagtgatgggttgaagataagaggcagatattaaacttttatgaggtagaataggcaaatgttgatggcttagggaagtaggggggataagggatagggaagagctagagtgaatgagtcccagcttgagagactgggagagtttgttcactgagatccagatatagcccaataagatctatacccacctgcttgtgattcttattaagtacgaatactgtctcacctgagtggttgagaaggtgcgcttggataaaatttgcttcactcccatgatttgaggaagccacaagaaaaagaaaaggaaaaaaaaattgcttcactttgtgtattattattgtatagtgagctatacaaaagtttggctgcacagcaaaaatgcagaaatacctttttacagaatttttttattccattgtttgtgactggtttaaacattctaagaaacatgrttggcaaaatggagtcttgaattctttttttttttttcctaagttgtttctttaaggtttagaaaataaactggttttacaaaccttgcctgagagcaaaggaaactgctgtgttcttctatttccttctctgctcagtgtccttcttaagtctgtgtgctgctcaattattgtcatgtttatccactgatgtgcatttcagcgctcaactcatggtccacactccgttaaaaaatgcaagttgatgatcacaaagttattctaatgtttgraaartacccrctaccctcagcgacttgcctgctgggttggtggtggcagagctaagttcgtaggaagtctgctcccgtgtagaattgtgtgctgaagggttgccatgtgggtggtaccctggagaagctgcagttcctgccttcctgagcattccatacagcatgggatgattaattgctgattaaaacattaataaaaggccaaaagtcatatgcacattgaagaaatactctgttgtgtccttcatttcatcgtctggcttcatcttgtttctgtttctctgtccctttgtttctctctgtgtatttattctactcttccctcctgcccttccttccttctttctcttgttaaattgttgctttggaattagaaagaggcagattggtccagatgctctgcttgtggatctctgcctcctttagctttaaagttgctgaaagtcagcagaaaaactgccaggttagggctaagtattggatctgtgctccttatttgttgcctacttgccctttgcaaagagaacatggggaagcaggccagctctgcactgtaatgtattatagctgataaatgcaarcttgatcaaaacaactrgctccttaccttgattccgatgacagcactaggctagaaacttaacccttatattatactttgactctaactaatgttgaattgattttatggttacagattgatgagtgtgaaaagaaaaagagggaagactatgaaagtcaaagcaatcctgtttttaggagatacttaaataagattttaattgaagctggaaagcttggacttgtgagtatttgatggtgtgatactaatccgtatagtgtatatttttatttattaatttcaaataatatgaagaagtgaaagcatcatgatgctttttaacagagaccacctgactgactctttaaccagaagctattcattcaggattaaaggcactactatactgctttgcagtggtctggtggaagatgagcagtgcagaccgctctttctcctctagtttgtatggatttacttactcagctctgtgcactgctccaccagttaatggaggtgaggaggtggggtgataattctgttctgatcctactccttgttttctctcagtatatgctgagaaaaagaaaaatgtgttttctgtagtttttctccttgttgtttactgtggtgagtgctactttatagacatattgttcataattattgttaaaatttccttttttttttgagacagagtctcgctctgttgtccaggccggagtaccgtcgtgcaatcttggctcactacaacctctgcctccygggttccagcaattctccctgactcagcctcccgagtagctggattacaggcacctgccaccatgcctggctaatttttgtatttttagtagagatggggttttgccatattggccaagctggtcttaaactcctgacctcaggtgatccgcttgccttggcctcccaaagtgctgggattacaggtgtgagccaccgcacctggccaaaatttctatttttaagaagtcactgttttcacttkgggaagtgaaaacttcccagacttaatgcattaatttagttttaattcacttaccaaagtgaaaacatcaagaaaacataaatttaataacttataacatttagaaagctcatttaaaagctcatagactttttttttcctattgtgtgtgccaccagaattgacttagagagtcagagaccagcctttggtcttgatctggccattagccccacctgccagaagtggttacaggcagatccctgaaaatgaaaggcccttgcatcagcacagtgtaggctggcaaaacttgccatatactccatcttcctggtacagtaagaagtgaccaaaagaaaaaggagtgttagatgaataacgccaccttattctggaaatgtagaagcagatgcgttctcatacgtacactctgtaatttgagccttacagctacgtacagggtggaacagaacctagataaggaaacagatggaaccaaaaatacttaagatggaaatgctggaaaatatttagtttctgatttttttttttttttgagacagagtcttgctctgtcacccaggctggagtgcagtggcgcaatctccgctcactgcaagctccgcctcccaggtttacaccattctcctgcctcagcctcctgagtagytgggactacaggcacccgccaccatgcccggctaattttttgtattttcagtagagacagggtttcaccgtgttagccaggatggtcttgatctcctgacctcgtgatccgcctgcctcatgcctcccaaagtgctgggattataggcatgagccaccgcgcccggccacgtctggctaatatttttgtgttttcagtagagacaggatttcaccatgttagccaggctggtctcaaactcctgacctcaagtgatctgaccgcctcggcctcccaaagtgctgggattacaggtgtgagccaccatgtcccaccttgtatttactgtttataaaagaaaaaggaattttatttgtatcaactggctaattaatgcaaaatttgtttagtgattttgctaagctgaactcacactaataaaggtagttataaatatgtaatttatggaaacccattattttgttgctctttgagatccttcttgtttttcttgtttgcactaatacagattttaggctatctgaaaactgtcaggaaatgaaaagtcatgcagtgaatcataaaatgaagatgcacagttgatcctcattcttcacagattccgtatttatgaattgacctcattaagtctgtgtaaccccaaagtcaataatcgaggtgttctgtggttactctgggacacagtgaagagtggtaaaaaatttgggttgcctgttgcaggcattcccagctgagatggaacaaggcaatcaaaactgttttcttgtttcagctctcgtactgcaaacaagtgtctttttttgtggtctatttagtggtatattttttcgtgcttttttgaggggagaggggtgattttttttatttttattttgagaccaatcattaaacagcatcatttcgttgtttaaaacggccctctgatgtagtgctgagctgaggtctagtgtttctaagtgcaagaaggccacgatgtacttacagagaaaaggaaaaggtgtgtattagataggcttcagtcaagcgtaaggtataggacagttgtccatgtgttcagtgttagtgaatgaacaatatgtattttaartaaggtgtccttaaacaggaatgtacagaaacacacataaaacaaggttatatattgatcaattgataaaaatgttatgacaggtttgcacgaaccaaaccctgtatttattataggagtaatggttcagtacttgctaattggtgtttgaggtgactttatagaagataactactgtgaggccgggtgcagtggctcacgcctgtaatcccagcactttgggaggccatggcgggcggatcatgaggtcaggagatcgagaccatcctggctaatgcggtgaaaccccgtctctactaaaaatagaaaaaattagccaggcgtagtggcgggcacctgtagtcccagctacatgggaggctgaggcaggagaatggcgtgaacccaggaggtggagcttgcagtgagcagagattgcgtcactgcactccagcctgggcgacagagtgagactccatctaaaaaaaaaaaaagacgataactactgcgaatagcaagaatcaactgtattttagtgaaatttacagtatcttttttacatagagttctagaatttttaaatgtttttcatgtatattatctttggttttcatgttggcctgtgaagacaggtggatattattattattttttttttttagagacagggtcttactctgtctcccatgctggagtgcagtggtatgctcatagcttactgcagcctcgaatccggggcacagacaattcttctgcctcagcctgctgagtaggcaggagccaggtgcacaccactgcacacagctaatggttagaattttttgtagagatggggtctcgctttgttgcccaggctggtcttgaagtcctggcttcaagctatcctcccaccttggcctgtcaaagcactaggattataggtgtgagctacctygcccaggctattattcttatacatatgaaatactgcaaactaatatttagttccaaattggcttttgtcttaaaatggttcaccaagtagtaataaaattctctttctattgtttgttttttggtaaatttaatttagcctgatgaaaacaaaggcgatatgcattatgatgctgagattatccttaaaagagaaactttgttagaaatacagaagtttctcaatggagaagactggaaaccaggtgccttggatgatgcactargtgatattttaattaattttaagtttcatgattttgaaacatggaagtggcgattcgaagattcctttggagtggatccatataatgtgttaatggtaagatgggatgagggcaagggcaacgtcattaagtttcctttttaaaatactttccaaactccaccataattacgttaagaacctgtactaggtcacttatacygtattgatgaacaagccacaaaattgtagaaatgattttgtgcttttgagtccagttctttttagctgtcttaagtgtttttkgtggctgatttctgcttctctctgttttaaggtacttctttgtctgctctgcatcgtggttttagtggctacygagctgtggacatatgtacgttggtacactcagttgagacgtgttttaatcatcagctttctgttcagtttgggatggaattggatgtatttatataaggtattatatggatggagggttttacaattttaacacatttattcacaatgaaagaagactctaatccattgagagcaatcttgccttggatgtgggttggaggcaktgattagaggtggcccacgctggagaggaattaaatggacacttcttagctgacagttttttgattccttgaccagttagtgggtaaaaaagttcagtcctaattttcataacccagttaatgttaacatttgggcatctaagtcagaataaagccaggtgggttgggtgtggtggctcatgcctgtaatcccagcattttgggaggctgaggtgggcagatcacttggtcaggaggtcaagactagcctggccaacatggtgaaaccctgtctctactaaaaatacaaaaattagctgggcctggtgacgtgcacctgtagtcccagctactcagcaggctgaggcaggagaattgcttgaacctgagaggttgcagtgagccaagattgcgctgctgcactccagcctggaccacagagtgaggtctgtctcaaaaacaaggaagaaaaaaaaaagaataaagctatgtggatacatttaaaaattatcatgtaggtaatttagagtatgtcattctatgtctttgctagaaatgataccaaaatattattttttaaaaattaggttattttttgaataagtggtatattcatggcagagaatttagaaaaggcagatacaaggaaattaatttttaaaataacctataattttatcacctagagaaaatctgtcagtagtttaaggtatttctttctagatttttctagattttaattatctttcaaagttgggatcatactgtatatagaaattggaaaggaccactactgttcccatcaacatagcataaataataatcattgaaagaaaattttagatctttctagcagagtgagtcaagtagccaagtattttcaatgatttcatctggttaaagcattgtgacatttccttaaccttttgctgtaagtattatagtatttagaactaattatttacaaattaaacacagattctgtgtggaaggaaagttgcttgagtattgtcaccttaatgattgtatattggtcattgtactggaaattatccagtgcaaaataggatatcatcaactataaaagaaaataagaagtagtcatttaatttgtatggctagaactaattgttgttgttgttgctgttgtttttgagacagtctcactctgtcccccaggctggagtgcagtagtgaaatctcggctcaatgcaacctccacctcccgggttcaagcgattctcttgcctcagcctcctatctgggactacaggcccgtgctatcacgcctggctgaactaatttttaaaaacaatatttttagtaaagtttccctttttcattataattacttacagagaaggcaattgtagttagtactttatgcttacttgttgcattaaggctgtacttttccatgaactggaaatagctactctttacaaataatatgttttcctataatcctagcactttgggaggctgaggcgggcggatcacttgaggtcaggagttcaagaccagcctggccaacatgatgaaaccccgtctctactaaaaatacaaaaattagctgggcgtggtagsgggcacctttaatcccagctactcgggaagctgaggcaggagaatcgcttgaacccgggaggtggtggttgcagtgagccgagattgtgccaccgcacaccagcgtgggtgacagggcgagactccgtctcaggaaaaaaagagaaaaaatagtaataataatatgtttttttttaattaaaaatttataacagtctggtttggatgaatggtaaagacactctttgaatgaaggtcttttggatgtgtaggcctaaccttcataggtaayggcctctcctggttcccttttggtgttgggcagctagcttttgcacagcatcaggctgaagtcgccaagatggagccattaaacaatgtgtgtgccaaaaagatggactggactggaagtatctggggtaaggtgtttgtgcacttgtccttattttgaatagaaattctgagaatgaragaacatagaacaaagagaatgataaaataacaggaggctttccatgactgaatctttaatatcagaagaacatgcaagaagcattttaggtttaaaaccagtgactttttatgctcatctaaagtcacagggaaggaatagaagttgtatatatgttggctctgatattatctgtcttccttcakaagactgtgtgaaggatcctakgctcgcttttgttcatctcgttctttgcacagggtctggcatattctcaatagaagtttattaaacaagtgaatgaatgtatatatgaattaatatccatcttaaatttaatggccttatattgacttgtgaaattttatgttgtagctttacttttttttaactacgggaaaaattagtttttttattctttcacattttataaacattctcatgaatgttcactacctttggttgtatgtatctagcaatggggatggtttaataatgttccaaggcattttataaatgcaagtccatgactgacacggaattctgcagatggaatccaaaataaatgtttcttaaaaagttgtgggaactaaaccaattcagccttccttcctggcttcagtggacagtgaaatgcctcctctagctcaggctagtttcccaacgtatataagcctgatttggaaaaattagaactaatattccactttattttgtaaactccataaagaactgactttttaaattaaaaatttactgaggtaattgtggattcacacagtaagaaatactacagagagagcccgtgtaccctttccccattttcctccagtggtgacatcttgcacagctttaatagtacaatatcagagccaggatattgactttgatacaatccaccagtcttatttcgacttcccattttacctgtactcatttgtgtttgtgaagcattgcttttaaagtgtttaccttttagacatttttataaaatacaattttttatctgcataaaacatgtataatttgaatggatttttaaaacatgattttggacataagatgaaaaatttaaaaatcagcattacagggagtctacttaaaacttaagataatttaaaactcattggtgggtggtcagggagggtcaaaaccaaagtaatgtcttrtttgggaatgaaatgcaacattaaaagaaatgatcagtgttttgtctgtttctctaaacagaatggtttagaagttcatggacctataaggatgacccatgccaaaaatactatgagctcttactagtcaaccctatttggttggtcccaccaacaaaggtatagcatatattttgtaaaaattacttaaagtcagtcagaaatcccttgtattttaaagaactttagtgtttgagtcattttgctaataagcgtttgtccaagaaaaaatacttttgcacagtgattttcacattaaaaatggcacaacagcattttaatttatgtaacatactttcagcatcagtactcaatgaattttgatgcattctgtaccttagtcctgtgaggagaaaattaagttgcttttctctcgttttaggcacttgcagttacattcaccacatttgtaacggagccattgaagcatattggaaaaggaactggggaatttattaaagcactcatgaaggaaattccagygctgcttcatcttccagtgctgataattatggcattagccatcctggttagtattaatatattagcactgtcgggccaggcrcrgtggctcacgcctgtaatcccagcactttgggaggcctaggcgggcggatcacgaggtcaggagatcgagaccatcctggctaacacagtgaaaccctgtctctactaaaaaaaatacaaaaaattagccgggcgtggtggcgggcgcctgtagtcccagctactcgggaggctgagrcaggagaacggggtgaacctgggaggcggagcttgcagtgagccgagatcrcaccactgtactccagcctgggcgacagagcaagattccgtctcaaaaaaaaaaaaaaattatacatatatrtatatttatatatctatctatatatatttatatttatatatctgtctatatttatatatttattatatataatatatatttatatattatatatttatatttatatatatatatgcactgtcagtatttagcaagatttatattaaatcttagtattaatattagtaatactggttagtattaaatattagcactgtcaatatttagcaagatttacagaaaaaaaggcaatgctaaaattattgggcttctttgatgttgtaaatcaggctaagtcacgcttaatgagaaggcgatttttaagtgatacagatttttttcctcccctctgcccctctaaatgatacagacatattatacttacttgtatatttttataatcaagaaagtagttctctagtttgattgcatatgtcatagcagtgatttagaataataacctctttttaaatgtgttaaccttggtaaattaatacacaggaaataggaagttgatttctgtctcccagaaagggggacttcttatttctagtcagtttttgcagcagtgagaagggtagagcattgagtttgacacagaaccagaaagggatgtggaagaacatgggtatgctgagaaagagtttggggatccaggagcagacattaagaagaaatattactcgtcatccctccatggtctrttcagtgttttttgttatcgattttttagctattacccaagtaaagcagttgtcgcataaaacaaaaagaactcagatgtgccaagggaaattctcttccctaaggatacaagattcactatctctgttcactttgaaatcgtttcttttttggttttgttttttggcttgtgattacaggattatgtggttgacgggtatttttttgttaggtgacattagttctatagtcatagtttagtctctgaaactgaaattwtcagcagagtcttcaccatctgtttttgtttcatgtgctccctmaggaaagttatgctctttgacttttgctgcttttgtcttcaaatagtagtgtttgaaaaactagtacagaaattttcaaagtttctgttctcaggacctctttgcagtcttaaaaattgaagcccacaaacagctcttacttaaggtgattatatttattgatacttacatattaggagttaaaacaaatttaaaacayacgagtactgtacacgcaagcatgcatcccctgagtctgagtgaggctgtcactctagcatctggaaygctccgttgtatattcaggaggggacagtgaaaaagacaaataataatgtctttgtattatgaaaagttttgatctcatagatctcctgaaagtctcaggtatcccccgggggtccctgggccacactgtaaggaactgctgcctactttttcccatggaatgtgaatcaaaacctgttgaattttagctgtaacttaagcctagtttatatttgtaaaaagaaaatgtacagaagattgtttacataatgatatacaactttaaatattttcagcatttaccttatatgatgggcatgaatctagaaacatgaataattatcagactagaaccttctaatttaaatatctaggcttcagcctgccattgttatagttyaatcgaaatgtgtctagctgattaaaatgtctactgaaagatttattaagttttattggccactctggccttgtattaatctaaagaggtctctaatgaaaaaaagtcaaattaacatgtttatgtctataaatgccacaagtaagttaaattacataactttgttagcactctgaataaaatgcctcataacttttgtaagttagccattgagtcctcaggaaaatgtatttcttttccttacagagtttctgctatggtgctggaaaatcagttcatgtgctgagacatataggcggtcctgagagmgaacctccccaggcacttcggccacgggatagaagacggcaggaggaaattgattatagacctgatggtggagcaggtgatgccgatttccattataggggccaaatgggccccactgagcaaggcccttatgccaaaacgtatgaggrtagaagagagattttgagagagagagatgttgacttgagatttcagactggcaacaagagccctgaagtgctccgggcatttgatgtaccagacgcagaggcacgagagcatcccacggtggtacccagtgtaagtcagcaactcttttattctgctgtcccttcattactggttctaaatccttctggaagaggtctgattgtttttactcttttacccctcacccttaattatatcatgagtgatacagccactcactctctcccctttctggtcaaaagttagttcagcttcctcagaagaaataaaattagatttaacttttatgtaaaatacaatttaacagtagtttgttagagcagatggtaattcatatgaaccttcatgggaagccagcrtatgagcatgacagaaatttctatctttgaagagatcagagagaaggcatcactgaaggcccggagctctagggaaggtacagtagagccctaaaggattagctggatggaagagtgggctggggccagggatcaaaaacattgcttccccaaatcttcagtgtcattggctggctagactatactttttacctgtagaatggtaagaagaagtttttcaccattatcagtcttttaaagggacatttccatttctgtttgagagaggaatttgtattgtcatttgaaatgtttaaattgcagctgttaaacctttgaaacagttatgagcataatagaatctgggaaattatagaatcccttcccatagtttcatataaaaataaacatatctacatgtatctagaaagatggaccaggcgcggcggctcacgcctgtgatcccagcactgggaggccgaggcaggcggatcactggaggtctgcagttcaagaccagcctggccaacgtggcaaagccccatctctactgaaaatacaagaaaattagccaggcgtgatgtggtatgcacctgtaatcccagctacttgggaggctgagacaggagaattgcttgattccagggggcggaggttgcagtgagccgagatcgtgccattgcactccagcctgggtgacagagtgagacgtcgtctcaaaaaaaaaaaaaaaaaaaaaaaamamcttaagatggtccttccagcttttatagttagtaattacctgtcacctatctcaraagtcttccagkgacttcctatctcacttgaggggaaagccagtattacaatggcctgrragcctccttggtctccccttcccccacatccactacctctctggtcacctyttctccctccgkgcttactctactttagccataagggctcctgactgttccttgaacttgagagcctttgtacctgctgttcattctacagtcttcatttatatatcaatcatatggttactttcttcaggcctttactcatttttattatttttggagacaaggtctcactctgtggtcaaggctggggtgcagtgatcatagctcattgcagcctcaaaatcctgggctcaaccgattcttttgcctcagccttctgagtaactaggactataggcatatacgaccatgcctggctaatattttttattttttgtggatatggggtcttgctgttacccaggctggtctcaaactcctggcctcaagcagtcttctcaccttggcctcccaaagttatrggattacaggtgtgagccaccatgcctaaccatatcactttttcagaccaccctaatttaaactgtaatttgaccctgccagcccacccacattcagcactcatctcttctctgctttttttacatagcctctttaattcaacatatcacacttgtgtgattttcttctaacctaaatataagttccagtgagaacagttttatgtattttgttcctgctgtatccctaacacctagaacttaatatatgctcaagaaatatttgtcaaatgaattattctcaccaggcaagagaagttgacaatactgatgaccaattctcttgaccccttctaagctgggccactagaccacccagtatatgcgctaagcgttcccactcctctgtgggagtactgtggagtttggtgaggtataataacatttatataattataacccagcactggaccctggatttgaaagagtttggagcttgctacaayggatttgggtgggaactttttagatatgtttgattactaagacttcacattacattaaacagttaaaatgtaattttgtactttatagcataaatcacctgttttggatacaaagcccaaggagacaggtggaatcctgggggaaggcacaccgaaagaaagcagtactgaaagcagccagtcggccaagcctgtctctggccaagacacatcagggaatacagaaggttcacccgcagcggaaaaggcccagctcaagtctgaagccgcaggcagcccagaccaaggcagcacatacagccccgcaagaggtgtggctggaccacgtggacaggatccggtcagcagcccctgtggctagaggaacaccagcacaaacgacagcctcaagtctccttcgagctttgtaaagtatactcttyactctctytctcttctctgcaagaattctgattactacaaaggtgccaacttcaacattcacatttcaacttcaacattcacatttttactgacaattagaattaacaaacacgttatatatgtaaaagcttttcatttcatcttctctttgatatttacatcccataaagtaagaagtgtttattttaagatgaacagatgacaggcatcactgattctggatagttaaggaggccagtttgaattggggacattgaaaaagaaattttattgttacaggcacttacgggaacccactaaccaatttacattgcctagtgaatccactagagttaaggccacccacttgatgcctccagcatcttcatgcagccatggagtatcgttaccaggatcagtctgactgacacctcagcttatctctacgcaggctgcccacaggtcactgtrgctgtagtttcatcttttccacagctattactacgcctgcatccttattgttccttttactttgtttacttagagaaaactgaagactgccagggcaatttagataacatagcttgttatattggtaatctgttttacagagtcagtcgactgaaaatgactttattcttttcccccaccaattgaagtgcatgggctttttataaaacctattttttgtgttactcagaatcctagcagtggagactattagatattaccatatcttaattcatattatagcaaatcatattgtcttgtccataggaagtttgcatttttagagatctatacatagagaataccatgatgaggaagaagagagttgggtgtcttccttaactgcagacaggacatcagtcagcactttacattagyctttctgattatcaaaagcattcctcattttaaactttttaaaaagcaatgcataaattttgtacctgtccttagcagacttcacagacatcaggtgtcctttgttttaaccatattcacactacaagttatgttcaactgcttactaaaagtgataccagtcaggaataaagtctttaaattttcatgcagatatttgtatcccaagcacttgcttttttattttaatatgaaatgcagaatacacatttttggatccaggaagtgttacttacgtgcctgtaacaatgtaattttaggccaggtgcagtggctcatgcctacagtcctagcactttggaaggttgagggaggatgatcgcttaagttcagttgttgaaatgcagaatacacatttttggatccaggaagtgttacttacgtgcctgtaacaatgtaattttaggccaggtgcagtggctcatgcctacagtcctagcactttggaaggttgagggaggatgatcgcttaagytcagttgttcaaggctatgtactaaaaataaaactagccaggcatggtggtacacgcctgtagtcccagctacttggagggctgaggcaagaggatcgtgaggtggcagtgagttatgatcgagccactgtactccagcctgggtgacagagcaagaccttgtctcaaaattatacatgttaatatattctagtttaatattgcaaacatctttagaatttcatcagaaacgtgattttttctaagaaatgcaaaaggattttaggatttttaacacagaggacatgtttaacaaatgaatcctgacagacacctgcagtttagaataaatttgtgaacatccatgcgtataaagtgtcctcttgggacaagacatgttcacactgacttggggaatatgcccccaaggtgagagctgtcttttgaactgtgatctgactctgaaaagtagtgaatgccccaggtgatagactgtaactgtgagtggaattaatgctgcttgcatgccttttaatccaaaaccaaattcttttaaaaaatttttaaataaaatttcacctttgtattctttcattacagatatccatttggggatgaagtctactttgacagctagcaaggcgacatgcaactgttgttgaatgatgacagcaattcaggaaagacttaaatatgaaagcaaattgaacacatcgggtgtttgttatcagaaaagagatgagatgagataagacttgtttattgactagccaatatgtcattaaaattaaggtttatattgtgaagcttttttgaaattttacttttttttgagagttttgctctgtcacccaggctggagtgaggtggtacaatctcggctcactgcaacctccacctcccaggttcaagagattctcctgcctcagtctcccgagtagctaggattacagatgtgcatcaccatgcctggctaatttttgtattttttagtagagatggggtttcaccatgttggtcaggctggtctcgaactcctgacctcaagtgacccgcccttgtcggcctcccaaagtgctgggattacaggcatgagccattgtgcccagcctatatagtgtgaagcttttaggaaaatcagaycagggtagacagctgttaaaaacaatgtttaaatggaataatgttgaatgtttacaggctgtaagaactattgtatacacaaaataatacacaaagtttgtactttgtgtacaaatacaaatttgtactttgtgtacaaataatacaaaaagtttgtatacacaaactttttacgttgtggtttggtatattgtcttaactgaattttcttataagaaccccatgaaacttacctgagtttttaaaatgctatccaggacatcataccttatagtatacatgaaacataatgtaatccaggttgtaatttagaactttttttttttttttagctgagcacttaatgtaattaattccagyttatgactcttaaaaaacattggccattagagaaatagttctatttgcccatccaaatcacctgaatgactttttgaaagaataggggtccacatccccagatcccatcccagctgtgcacagtctgaagcaagcagagtgaaacaagttggcaacttgttccaagcgtgggcctttgcagtctgtgatccagtgttactccaggtcccagtctgtcccatacttgtcttttgctacagttagttagttactttgttatcatccccttgtaaactgccttcaatatctgggataaggaagacaaagcttaatgacaactaaggttctagctgacatctttctttcatatttaatttttgtgagttttcatctgttttctgtttgtttatgtgtcrtaggttcttgacctaaccacatgggttttgttttttgtttttatattagaacttagaaaagtttgttttacagcagtattatggaacagaagagaccattttaaataatttttttaaacagcccaaaacacacaaaagatacttgttttctagagacagggtcttgctctgtcacccaggctggagtgcagtggcacgatcatagctcagtgcagcctccacctcctgggctcaagtggtcctcctgcctcagcctcttaagcagttgggactacaggtgtgtgccagcatgcttgctyttttttttttttttgagacagagtcttgctctgtcactcaggctggagtccagtggcttggtctcagctcactgcaatctctgcctcccaggggttcaagtgattctcctgcctcagcctcccaagtagctgaaactacaggcgcatgccaccatgcccagctaatttttgtatttttagtagagacagggtttcactatgttggccaggctggtctcaaactcccgacctcaagtgatccgcccgcttcggcctcccaaagtgctgggattacaggtgtgagccactgcgcctggctgctgatttatttttcatagacacgggggtctatgttgcccaggttggtyttgaactcctagcctcaagcgatcctcctgcctcagcctcccaatgtgctgggattacaggaatgagccaccatgcccagcccaagaagtagagtttcttttatactgactttggcctaaaaaaacagattttcatggaggaaaaaaaaacctagatttttartaagactattttatatacttttttacattgatcaagtacattatttttaccaaacaacattgtttcccactacatccatggttatgtataaaaaamcgccattgtcaattaagatgttaaaaaattatttccataagagtattaaattctaatctatgattcacttaacttcctactttataaacactaggtaaagtaatctcrcaagctgccaaagaacacatcccaagcagtaatcacagaygatgaagcaccttacaggacccctccaccctcaaacgcgcatgtccagagaagtattaatgccttaatagactactgaaggttaactatttacatcattctaaaaatattttaagctgtattacagtgctataaattctccttttaaggaaaaaagtaatagattgtttccttaccgtgtttgaaaggaaaaaaaataaatccatagtaactaatggtctgccgattttttccctgaatttttaaactccaacaaagcattattttgcaaaaagtcctttagcccaaagtcagtgtctctgttttgatctctttgtaaaagaactctctgttcatccattctctttccctgggrccgtaaaataaggctgaaaaagtcttcatctggtactgtcggaccctttgtggtagcaggtggtggagcacatctttgatcatctaatctgratccctagaagtttatgagagagattaaaagacatactgtgggaaagaaagcaccaagctatgttaaatctctcagtcacaacaagaaaacgcagttgtaaacttttatttggggcttctcagaaattaatctttgtttttatattgttctctttagttcccagcctgatttctgaaagaaataatctttaaacctgaaactgcataaaatttttcctttaaaatggcttatataggtatagctgcttcattggtttagtacgtgcattatgttaagtcatactgttttaattataattggtcacaaggataaaagacaaggtcaactgtatctaagtatgacagttcaaggttataatctaacaggcatcaactgtgtaacttaacaaatctttagaaatatgtacaaaccccatgaggaactaccttaaaaaaatcacgtcttaggctaggggacagcaaactgtaacccagtgccggcttctgtaaatgaagtcattttcattttcccatcaatacatatgtttatatactatctatatggctgcttccctactaaatggcagagttgggcagttgcaatagataccatatgggcggcaaagcctaaaatattttctatctggccttttacagaaaaagtttgcctgcctctgtcttaggctgttaaatctgttaagaaatagcccagamtgaatttttttttttttttttttgagacggattctcgctctgtcatccaggcaggactgcagtggtgtgatcctggctcactgcaacctccatctttcaggttcaagtgattcttcagcctcagcctcccagtagctgagactayaggcatgcgtcaccacaccyggctaatttttgtatttttagtagagatgggggtttcaccatgttggccaggctggtctcgaactcttgacctcaagtgatccacccgccttggcctcccaaaatgctgggattacaggcatgagcctggtctctgaatttttctttcaagtttgagtattatgattcttatattagacatgctacttgtcaaaaaatacatgcacttacaagtatacaccatagtttctggcattgtagctcaagagtaagaatagaagtgtgatagctgatatttgaatatgcactacattgttagggactgtgataagacatagatccctgaacatttaagcccacaaccctcagagggtgcagttatttactgccctcctaagtgagtgccacctccacacatacctggctcattcatttctcctgtcataaattgataatttcaatgtcctccaattaacccaacacttgggcacttagttcctagacttcctcacttagttcctagacttcctctgattgaatgtcctcatccttcacttcggccttagccatttggctcccatggtcatattctagcctcttgttatctctatagaaatgcctcttccagttctttgcccatttttgaatcaggttggtttttgttgagttttaggagttttctatatattctgggtattaatcctttatcagatatgtgatttccaagtattttatgttgggttgcctttttactgttgataatgtcctttgatgcacaagtttttaattatgaagtccaatttgtctacgttgttgttgttgttccctgytcactcttttggttttataaccaagaaatcactgccaaacccaatgccatgaggctttccttttttttccctttagagacagggtctcactctgtggcctaagctggagcacagtgacgtgatcatggctcactgcagccttgaactcctaggctcaagtgatcctcccacctcagcctcctgtgtagctgggactacaggtgtgtgccattaatttaaaaaaawttttttatagagatggggtctcactatgctgcccagtctagtcttgaactcctgggctcaagcaatcctcccaccttggcctcccaaagtgctgggattacaggtataagccaccacatgctcctcttgagttttatagttttagttctgatgcttaggtctttgryccactttgagttttgcatatggtattaggtaagggtccaacttcattctttttgtatgtggctctctagtttacccagaaccrtttgttgataaaactgtcttttcccccactgaatggtcttggcacccctgttgcatatyatttgaccacacatgcaagggtttatttctgggatctgtattctattccattggtctatatgtctgtcttttatgccagtactgcactgctttgattaatgtagctttgtaataacctgaaataaaaaaatgtgagccctaaagctttattctcaagactatttcggatatttggggatcccttgaggttctatatgaattttaggctatattttctatttctgtaggaggaaaaagtcatttggatttttacagggattgcactgaatttgtaggtcactttggatagtatcgaaatgttaacattattaagtcttctaatccatgaacatgggatattgttccatttgttttctttcatctctttcagcaatgttttgtggttttcattatacaagtctttgcctcagtgattaatttctaagtattttattctttttgatgctattttaaatggaattttaaatttcttttccaattgttcattgttagtgtataaacacacaactgatttttgtgttgattttgtatcatgctactttgttgaacttgttgattacctctgtcaattttattgatactttgtcctttccaatgtgaatgcctttttttctttttttgcctaattgctccagctagaatttctagtactacattgaatagaagtggcaaaaacctgcattctgatctcgttcctgatcttggaggagagctttcagtctgtcaccattgagtatgatgtcagcggtacatgtttcatatatggcttttattatgttctggtagtttcctactgttgctaatttttaagkttttatcatgaaagagttttgaattgtcatttttttcctgtatgtgttttttccctttattctgtttatattatgtgttacactgattgattttcacatgttgaacaatcagtccttgcgtcctgggaataagtcccacttggtcatggtgtaaaatcctttacagcaggggcgctgctaaatttggattgtaggcttttgttgattttgcatctggattcatgaaggatattggtcagtacttttcttgtagtgtctgtctggctttggtattggcaatactggcctcacagaatgagttatgaagtgttcatttctttattttccttcttacagcctagattcttaagtccattattaaaatcacttcctggcacatgtcttcaactaccattctctcccctgaatcccattctcctggaaaaatagcagtcttgatttatctctgtgcctcaagcagctggccatgactggataaaatacacaattccactcactagttttacttccagtgactgaacctcaggtgggttcttagcacagcacagtgttcttaatactttccccctagtttcagtttctctaagtcaactatttcccacttcctttctcttcaaatttatagtgctccccaactccaatcttaactgatgactacttctttctttggtgagaaaataaaagcagcccgagagaattcctacttgctcccatctccaaatccgtactctgctttccctctctcacctacacaaaaactgtgttcttcagttaccccagacttacctacatcactgactcttctctacttgaccatttccatctgtagataaactacgttttcacccccaaaaagaaaaaaaaaaaccccacatttgccttgtatttattttctagctaatggtccatttaacccattaaagtttctatatttactatctcccctttcacacttcccattttctcaccccactcaatcctttgtccccaccatgccactggaacagtatctttcaaaattattcataatctccatgttatcaaatctagtagttccgtcatcatctgactcaggttcttagcaacatttgccacagttgagcactgcttaagatacactctttacttgatttccaccacaccacaccccacccctccccagcccacccttggggtatccttccaactctctgsctgttgcttctttgccagctcatcttcctccatctaaccagtagattttgaaatgctcagggcttagtcttcctgtcctattctttaggtactttcttcccagggctttaataccagctataagctgatgtctcccaaatttacttctcccttgggctccagattttacatcaaattgcctatttaacacctctacttcattgtctataccagtcacacttgccattccttgaactggctaacagtttaccaaatttaacatgtctaaaacagaactcttgctttttctctccaaacttgcttttcttctagtcatctccatttcagtgaatagaaccattcatttcccagttattcaaggtataagtcatccttgattctctttccctgaaaccctctactcaatttattaagaggtcctgccaactaaccataatatataactgatataatagctaataatgtagccctatgctaactacttctcactgttaccactctagtccayatcaccaatattttttgcctgcatcaccatacaatctttctagctggttttcatactaacacccttgccactctacgttcttccatcagtagccaggatcctctttgaggacactcccagtaccttcctaatacatctaaaacacgactttatcatggcctccaaaagcctagatgatctaggccctgattacttctccatcctcattttgtacaactcttcccttcccctactcatcccatgccagtcacatctgccactccttgaactggctaagcttttatatccaagaggggacttgctgtctctgcatggaatactctttctctagatactcacatggctgactgcttcactgcattcaggtctctgttcaaatgacaatccagaaaggtcttctctaaccaccctacctaaaacagacactccccctaccaccaacacctttgcttacccactacccctttatcctcctttaaagttcttcatagcaagcataattacctaatacaacacacatatactctctctctatatatatayacacacacacacgtctctcctaaaatgtaagatcctttaaaaatcaagtgtgtcctcgatgcctagaatagcagctgaaacataatyggtgttcaataattttttactgaatgatggacaataataactctctaatacaaaataagcccttcctgaatgagaattataacactaccaatgttttcagtggtatctgagctgtatgcagaaygaaaaaaatatacagacatacttgacattttacaaggatgtcaaagaaatcttcatcagcctctttgttgtcattagtcatcaggtggctaagtaccgactggctgttttgtgttagacgaagccctggcaaattactgaaactagccctctggtcatccagacggcgactctgtgagctggcaagaagatctaaaaactcatccgtgttgggggataccacaggaacagatgatgctaagaacagaagaagaaagccaaagattaaaaaaaaacaaaaaacaaaaaacaaaaaaacctaggcacatttattatatacctagatcttttcggccttgccagtcccaagacccgccctgccctcctgctatagcgctgacactgatgggctttggctagatgggtgtggtttttattggctggagggaagaatgagccccagagtacttcagatgacccacttggacgttattcagatttgactatatttctctatttaatgctcactcaaaatgtaactataagatatgtgactagatttcagaaattgaacaaactgtttttcttacataatttctcagaccaggttgtgtaggacagtgttttttattccaagccctggatacaaatcatttagtaaactaacagttaagtgctgctggcaagtcttggtctatggtacaagaagtcttttggtagctgaaatagaaaaatataagtaacctatt

SEQ ID NO: 8819 - DNA, 38449 bp, Homo sapiens
  misc_feature (1)...(38449): n = A,T,C or G, or insertion/deletion polymorphism (see Tables 1-2)
caaattaaaatgttttgttagacatttccatatttttaagggcctccttggagctgccaggctgggagtgaggtttctctccctttctaaaccctgtgcccatcttgtcaccctcctggagctgccagcagacttcagattcttctccgatctacagagcagaaaaattcagccagcccttccttgtcttcctatccacagctgcctgcccagactcatgaaacctgacaaaatgcaaggtcttatcattacctgaaccttggacctgttcaaaaatactagttcctgagaataaatatccctggtgtcttcctgcccttcctgcacacctccagtggcttatcaaaatatttgtttcatgcgcacactgggctctcatttaagaggaatttgggagaatgttattttctaatctgcatttcacaccaggctccccctccttcctggggtgctagtgtcagcagaacctgatggggaagtgaggtctgggaggcagaggaggaaggaatgaggggaaaggggaagtttgggaggaaggcttctgagaagactggtgggagagaaggagagcctgcagacagaggcctccagcttggtctgtctccccacctctaccagcatctgctgagctatgagccaaaccagggatttacagggtagggagggtgggataggcagcggcattagatcrgaggaatgagatggacagacctgggctgtgggctaggagggcagtcagctggcctagggtagcccgggctggtgtcagggtaaggagaggaagggagggatgagggctgattaatttttttcaccccacaggaggaaaagctttcrgactgctgaaggcccagcaggaagagaggctggatgagatcaacaaggtagaaggaagaactaagggggcagagccagggggatggggcgtggatggggagggcctaccctggctcttattttcccctccatagcaattcctagacgatcccaaatatagcagtgatgaggatctgccctccaaactggaaggcttcaaaggtgagggggaaactgtaggcggtggagacagggctgggggtaggagggttaggatttccacaagaacaaggcaggaacagcagagataaaaagtttacttttgtggtagcaaaaggggaacctgcctttattgccctcctgccacactgcggtccctttcccgggcctgcctctctcagcatcccctctagctccttacaccctagcggggcccctcaactccccaaccccacttcctctgcctgcccctcctcctccttccacgttgtctcctccacctagcagttggttggcaaccccttcctcagtcccctgctgaaaaccctccagtcagcgcttatcccttctgctctctcccctcacccagagaaatacatggagtttgaccttaatggaaatggcgatattggtgagaaaygggtgatttgcgggggcagggtggtgtgcaggcctaagaagacagaggtctctcctacatgctccattcctcatgatttgggagggggcccacctaccacagtgggaggaaggagaatggggatgcggaagtgggagaggagagagagggtctccccaccttctccccatccccatcctctgcccccagatatcatgtccctgaaacgaatgctggagaaacttggagtccccaagactcacctagagctaaagaaattaattggagaggtgtccagtggctccggggagacgttcagctaccctgactttctcaggatgatgctgggcaagagatctgccatcctaaaaatgtgagtgtcaatttccaacctcccctgtacttacctgttttctcctcccccatccctacccttgtccacaggctcaacatttctacacgttgcccatcatcccttcttccatccttagagggacccttccaaggtcccgaccccatccctatccatagtcctggtccccagaaactccaacccctgcccttcctcttcccccttccaccctcacatccccatccccttctagcctttcctagcaccctatgatttattcccttgagaggagtgttccctgatccctgtgcctcttcccatctcaaccaggatcctgatgtatgaggaaaaagcgagagaaaaggaaaagccaacaggccccccagccaagaaagctatctctgagttgccctgatttgaagggaaaagggatgatgggattgaaggggcttctaatgacccagatayggaaacagaagacaaaattgtaagccagagtcaacaaattaaataaattaccccctcctccagatcaagtcagcttagtttttatttgggtgatttttttcctgggtttgggaaggagagacaggtcttgagggaaaggtggcaaggatttggccatatgaacaatccatcaacaacgctatagtgtgtccactacagcagatggtttcacgcaccaagggggattccagctgtgtaagacagccttaacctcaaagaatgcaggcaggacaaaaacacatgtccaaacaaggtactcaggcccatgacagatttcatgaagagcaaggaataccatgaaccaacattctccaccactataagctttgtcactttgacaaatcactcagcctctgtgaggcttttttctaaaaatggggataaagtgacctatgctattgtgcctgacatatcataagccctcaataatgtttaaaacttgaatgagccggggccgatggcttatgcctgtaatcccagcactttgggaggatggggtgggcagatcacctgaggtcaggagttcgagaccagcctgacgaacatgaagaaaccccgtctctactaaaaatacaaaattagcctggtgtggtggcgcatgcctgtaatcccagctacttgggaagctgaggcaggagaatctcttgaacccaggaggtggaggttgtggtgatccgagatcgcatcattgcactccagcctgggcaactaaaaagcgaactccgtctcaaaaaaaaaaaaaccgaacatacaaacaaacaaaaaacacttgaatgggtagatgaatgaaagaactggtgctattaaataaagcaaagaatttacagctgggcgtggtggctcacgcctgtaatcccagcacttcaggaggccgaagcgggcagattacctgaaatcaggagttggagaccagcctggccaacatggtgaaaccccatctctactaaaatacaaaaaattagctgggcatggtggcaggtgcctgtaatcccagctactcgggagactgaggcaggagaatcgcttgaacccgggaggtggaggttgcggtgagccgagatcacgccatggcactccagcctgggtgacaagagtgagactctgtctcaaaaaaaaaaaaaaaaaaaaaaaaagactggaaggagaaactcattggagacaatgactatggacatcccttttaagaattttgctgcaaagggtaacaaaacggtatgtgtggtagccggccggggagaagggagaagagaatcattttggaagtttgaaaacagaagtcatcttaaatcttactgagcctctgactaaaattctcatctgatttctgcaaacttttctgccttcacttttcataatgaataagccgcctcctttatttagccatatcagcctaggcacaggcccccaaactcatgcctccactaatctgttctctgcacctgagatgtacaccttcttctgaaacttgggtaagttctaactcgttcttcatatctatttatttatatatttttgacagatatctactccgatcattcttcatatcatttttttttttttttcctgagatggagtctcatgttggccaggctggtctccaactcctgacctcaggtgacccacccaccttggcctctcaaagtgctgggattacaggcgtgagccactgctcccgctcccggccctttttttcttctttttcttttttttttttttttgagacgtagtctcactctgtcgctaggctggagtgcagtggcgtgatctcagctcactgcaacctccgtctcccaggttcaagcgattctcctgcctcagcctcccaagtagctgagactacaggcacgcgccaccagtccagctaatttttgtatttttagtagagacggggttttgccatgttggccaggatggtctccatttcttgaccttgtgatctgcccgcctcagcctcccaaagtgccaggactacaggcataagccaccacgcccggcctcatatctcttaataagagtttttctagaaacatttctcaatcaccccaggcataatcatattttatttctctacttctttcttttttttttttttttgagatagagtttcgctcttgttgcccaggctggagtgcaatggcacgatcttggctcaccacaacctccgcctcccaggttcaagcgattctcccgactcagcctcccgagtagctgggatcataggcatgcgccaccacgcctgggtaattgtatttttagtagagacggggtttctccatgttggtcaggctggtctcgaactcgtgacctcaggtgatccgcccgcctgagcctcccaaagtgctgggattacaggcgtgagccaccgcgcccatccttctttttttttttttttttttttttttgagacgtagtcttgctctgtcacccaggctggagtgcaacctccgcctccctggttcaaggaattctctgcctcagcttcccgagtagttgggattacaggcgcccgccaccacgtagggcaaatttttgtatttttagtagaaatggggtttcatcatgttggccaggctggtcttgaactcctgatctcgtgatccacctgcctaggcctcccaaagtgctgggattacaggcgtgagccaccgcgccaggccttatttctctacttctataatatcctgtgcattatctccagcgccttcaaatcatagtcattgaatgatctgttgaatgggtataactctgatgggagcagagagttctagaatcgggtagtaagagacaaaggagggtaacagtactgcatttcacaaaatgaaacccattgttaagaaattacaaattcccaataatttcaaatataaaaatttattcatgaaaattataggttataaaattaaatgtccgtcttagtcgatggttgcccatattttgatgaacgagtcattcctagcctatctttgttcaaatgatttgcatacattatgcaaataggtagaactgcccgaagaatgcctacgctgcgtggtgcggacgaaacgcttcccggggcctttggattggtctgtctagccacctcatttgcatgacgtaatwtaataactggaaggccccgcccctctggtgcatttccccgctccaaccacctcctcaaactcacggcaaagggatgcgagagctggaactcttaccaggcctgcggaaactcagccctccggcagctaatcccgcccgccagcccccgtcctctctctctttctccctagctgaaggcgccacgggccgtgtgtcgttgccttccacttttggcgtcccaacgtctctccgctcccatctttctactaacgtccgacgcacgctccgcctctttctcccacattcgtcgtgtaaattctgcgtcccaaccgcccagccgacctgcaccgcattcccgccccctcaacacggctcaacggccgacgctgggggcccgcctccttagccaatcggggtcctagtgcccttaagtccctcctctttatgcaaataacctccgcatgctccgcgcgcccggcccttttttttttttttttaaactaaagacagccctggaagtagagggttagggtakaaagtgccccgccctttatgcaaattaaggggcgtgtctaggcgcggagggaggtgggaggtgggagggggtgctcccgggggcggcggttgcccggatgggccgttagtcggggctcagccgcggagtgagcgagggagacgggaggagccgaacccggcgccatccgccgccatcctcccccgccccaccgccatcccgtcccggggagcccctaggcccgggtcccggatccccgcgcacccggccagktgagtctgggtgaaccgtkcsctgacgcccttttccggcgcgggagaggtggtggcggtggcggtggcggcggcggcggcgktggtgggccggggggaggagaagctgccattagccgccgccattttgtcctcctgctgccgggcctgcttgcccctccccctccggtacctctactccgggacccgcacctccggcagttcattcaggatccgtagtctgcccctaaccacccaccgtcttggcttcagggggtgacccctgcgcctgggtccgtaactccctaccctccgctgcgctcctggcttttcacccccatttgtgggccccctccccggctgccgccccgtggtgggccgcgcccgacggttctctcggaagggcgcttttcctccatattggaccccctcctatcatccagcgctgtgttcccccctctggacgcccctcttcgtgtcgagccactcccactctagaatcctgcttttatcccagcatctttgctttctatgttgctcagtcgccctatgtctgctttttcatttttcctkktcctcgtctcctttctcccccaaccccgtttttcttcttgggcctctgcccccttacttcgttgtctacatcctttttttttttgccattcctgtttccatatattttccacctgctttcgtattcattattttctgttagttttggtctattcgctacatgactcttgtattcgttttcccttcatatatttatcttcacagattggcctcctcaaacacctacgaagcaacatccatcttatctctagcttgtcataaagttctttctccccaattttagctttcattctgggcctgtctggatttccctgctttcttccccactatttctcatctctttacactgttcccgtccataaacgaatgcctggtcactctggaatggactgagagacctgtcgtccggcttgcttagggagctggaggtatcgagtaaagaaacactggtgatggacatttttaatgaggataggaaaacgragrtggctctggccttggccctctgttttctggcccatggttacagggtgctaaggtggctycataatgctttttctcagttcttcatatggtaaaacagtatttcatctggaggcgattttttccaggagccaatacaggagcaagtttaggaaaagatgggatatttcaaatacttgaggttcctatagcctgggagtatgtacagccctagttgttctatgaggatttctctggtaccaacccccattccggctgagcaagctcataaaatccttaaactcccagcataccttcctgcaaaccttcccagatggacacgaggctgctgggctgggagcctggggtacagggccctgggggcatgattagggagcttgtgtccaataaacagggaatctaaagtgttgtttcttcttctctgatggaattgtatgcttcttttttagttttctcttgcttgaatttgtcctgttgtaagtctctgaaacgattttggtggagagagaagagattattacttgtagggaattactctttgtagacaggcacaaagggcagagtgtttatactaggaggatgctggatttttacttagatttccttgacaaagktgtctgggggaaaggagggaacatggcatttgagctatgagggagctaagtagatcatggttgcttragaagagtgggcagtttacatagactggaggaaaagacaccagagggcctcatatctgagtccctaatgataatgcaatggagtttttaagtttctgttatggtctgtacaggggacagagactgagacacttgctgtctggcccacaggctctggcacgttttgggggaggtgcctgcaggacccaacatactcaatgagcttccagcgcaatgtccgatcgctcggggccgactgccaagggaaaggatggaaagaagtattcctcgctcaacctgtttgatacgtataagggcaagtccttagagatccagaaacccgctggtgagagtcctgcaaagatgcttctgatggttgaaagctaggcatgcatggggcatacgttttagagytctttaaagggaagtggctgtagtagaaataccaaaagactagaggagatttcccaactttacactgggtcctttaaagggggtgtgggctctgggtgaacaccagttatcctcctacaaaggcgtgtctgtggttccctgtctttggacaygtaagaattggaggaaaataaakgtggatttgggaaactttgaggccagcttgcttcttgcaggctcatgatcaaccaatctcacataaaagtattgaatgttacatatctcagccttcttgatagggatttcatagattttttttttttttttttttttttgagaccaagtttagctcctgttgcccaggctggagtgcaatggtgtgatcttgacttaccacaacctccacctcctgggtttaagcgattatcctgcctcagcctcctgagtagctgggattacaggcatgcgccaccacacccggctaattttgtrtttttagtagagacagggtttctccattttggtcaagctggtcttgaactcctgacctcaggtgatccgcctgcctcggcctgccaaagtgctgggattgcaaagtgtgagccaccacaatcagcgcgatttcagagattattaagggcaggggaaggaatcccttctaagagaagtttggaggaagtaggtaataaaatattcaacatgtataaatgtgtcccaggataggaggccatcagatctcccacatgaggcattttcgaccctctctccgtcttgttctccagttgcccctcgccatggcctgcagagtctcgggaaagttgccattgcccggcgtatgcsacctccagccaaccttccaagcctgaaagccgagaacaaaggcaatgaccccaatgtctcactagtgccaaaagwcggaacaggatgggcaagcaaacaggagcagtccgaccccaagaggtagacagaggcttgggggacctagagtgatgggtattttaacttgaacttcagggagcattggggcttggtttagtccagccacgtctgagccrgagacgaagaggtccctttcttacctrttgcaggttccttgttaaatgactaaggaatggtactaaactttagctttttgtcttggagagagagcatgaaaaaatagacaacagcctacaaaggatgacaaaattawtttgtccttrtatttgtaaatggtagcaatgggcatgatttcagtcctgagtctccaccagttggagaagtcagggaggcatctcaggtgtgaataaccttcccattctgtcccctcagttccgatgcctcaaccgctcagccgcyggaatcgcagccactgccggcttcacagacgcctgcctccaaccagccgaaacgacccccagcagcccccgaggtacctggagaactggaggggtggggaggaagaatggttcatagctgccccacccacatcatttatcatctttctgaacacttccccagaacactcctttggttccaagcggggtaaagtcctgggcacaagccagcgtcacccatggagcacatggagatggtgagtgcagcacttaattggggagctgtgtctgggcaccatgggatgcatgaaccctgcactgtattttcagccaagtgaccttggtcctctttggctaaatcaaggaccacccatattcagtttcatggaggcacatgagcaagtttaagtctcagtcttatatgatggagtgtagtggtgccagaactgacctccttggggaataagcagttattctgtagsggggtgagtttgaaggcgggaaacctgatggtctggtacctgtcagagccttccactttttttttttttgagacggagtctcattctgtcacccaggctggagtgcagtggygcaatctcggctcactgcaacctctgcctcctgggttcaagcgattttcctgcctcagcctccagagtagcgggactacaggcacacgccaacacacccagctaattttttgtgtgtttttagtagagatggggtttcacatgttggccaggatggtctcgatctcttgacctcgtgatccgcycgcctcagcctcccagagtgctgggattacaggcgtgagccaccgcgcccagccagagtcttccacttttatagcatgtcctcaggaaatgtcttctgtctcctgttctgcatccccatcctaataggtggaagggcatcaagcctactgtcacgattctctcgagaggaatttccgaccctgcaggcggctggcgaccaggacaaggctgccaaggaaagggagtctgccgaacagtcgtctgggcccggaccaagcctccgcccccaaagtgagtggctgccttttggccaagacattacctattgcatctcagagctaggtgctggcttattcaccttcctccccatcactttcagctgtgttcacttgtcctccaatcattgatacctctctctaccttttccaaaatacagattctacaacttggagggacggaggtggkcgtggccctgatgagctggagggcccggactccaaacttcatcatggtcatgatccccggggtgggctacagccttcaggcccaccccagttccctccctaccgcggaatgatgccgcctttcgtgagtcttggtgtcttgtcttggaacgattacactggaagctggagagctaggaatcaggacttagtctttgacctatgagatagargggagggtgggaggatgattgatagcaggcttaaggagctagaagggtatatgactgtccctctgagcagctactgttggacccttttacagatgtatcccccatatctcccgttccctccgccctatggaccccaggggccttaccgataccccactcctgatgggcccaggtgagcaatccaggtctgggtttgtggctgggggcaggggaagcttattgggggaggagatggttttctagccaggaggctcagtctaggatcagtctcgcatgtggttatacaacatgccatatttcattttcttttttgtgtacagccgttttccccgtgtggcgggcccccgaggctcagggccaccaatgcrcttagtagagcctgtgggtcgtccctctattctcaaagaggataatctcaaagagtttgatcagttggatcaggagaatgatgatggttgggcaggtaagtggatattaagggtcaagaatttggatcttgaaaggcaaaacctaatgaggaaaaaaaaatacagggttatgtgggtgaaaggcagacattgaagtgtaggaagaccaggcccaatggctcacatctgtaatcccagtgctttgggagtgttaggtgagaggatcgcttgaagccaggagttcaagaccagcctgggcaacacagcaagaccccccacctctacaaaaaaaaaaaawttttttagttgggtgtggactgtgcatctgtggtcccagctactctggaggttgtggtgggaggatcagttgagcccaggagttggaggtcacagtgagctatgatcgtgccactgaactccatcctgggcaacagagcgagacttttaaaaggaaaaaaaaaaaaragtaggggaggatggatggggaataccaagtccttgcaaagtggtgagaggagtaagaatgacaagacttcattggtggatctagacttcggagggaaggatattggcattggtagtccatcttgttacatagttccagactacctcccaagattggagggcagaatgcttgggttactaatactcatatttcccctcaggggcccatgaagaggttgactacactgaaaagctcaagttcagcgatgaggaagatgggcgagactctgatgaggagggwgctgagggccagtgagttagggccatcaggggagaagaggagggggtcttggtttgtattttggtaatatactcttagaggagtatattagttgcagctgattttaatttcactgttgatctgctcacagcagggattcccaatcagcttctggtgaggaacggccccctgaagcagatggcaaaaagggcaactcccccaacagcgaaccgcccactcctaagacggcctgggcagaaacctctcggcctccagagacagagccgggacctcctgccccaaagcctcccctacccccacctcaccggggccccgccrggaactggggcccccctggggactacccagtgagtgtctccaataagggattgagagggtcagctgtgggaaattggtgtcagctgagtaattgaagcggttgtgatatagaggaaggggggtgctaaaaatgggctgtgtgaagtgccaggctgcagaacatcctgggaagcttttaaatatctttggtaataggggagtctgggtaagaagtgagaaactgggatgctaatgaggaaagaagaaaaaggagccctgggtgtttgggtttcggaaggagagagggaacagaaaaataaaaagactagggtggctagatagctggatctgttagtatgcatcagtagtccaagctactcagcaggctgaagcagaaggatcacttgagcccaagttcaagaccagcctgggcaacatagcaagacgtggtctcaaagaagaccaggataatgagtttgtcaccacccagagagatcaaccccaaagcctgggtcgttgcatcctgcaagtagcgacagttgatttgtygtaaaagagatgrtagaaagcatagtaactgattcccctggccctgctgggtcttgccaattgacaggatcgtgggggtcctccctgcaagcccccagcacctgaagatgaggatgaggcatggcggcagcgacgaaagcagtcgtcatctgagatttccctggcagtggagcgggcccggcgacggcgagaagaagaggagcggcgcatgcaagaagagcgccgggcagcctgtgctgagaagctcaagcgactcgatgaaaagtttggggcacctgacaagcggctcaaagcagagcctgctgccccacctgctgccccttctaccccagctccaccacctgcagtccctaaagaactccctgcacctccagctccacctccagcatcagccccaacaccagagamagaacctgaagagccagcacaggcccctcctgcccaatctactcctactccaggtgtggctgcggctcccactctggtgagtggtggtggcagtaccagtagcaccagcagtggcagcttcgaagccagcccaggtatggagatggggataggtactaccagatgtcagatcactgcttcaaggtgcttaaaggtgcagggtggtaaggctggggataaatgaagtagaaggcagttgttttggtttattggactrtcagtgatagtgttctatcatttgtatatctgaaggagggaaggttttgtctggaatcttaggttgtagyctaataccatttcttggcagagtactgtagctcacgcctataatcccaacacttagggaggcttggggtggaggatcgcttgagcctagggagtttgagaccagcctgggcaacaaagcaagaccctgtcggccaggcatggtggctcacacttgtaatcccagcactctgggaggccgaggcgggcagaacatgaggtcaggagttcaagatcagcctggccaacatagtgaaacccgtctctactaaaaatacaaaaattagccaagtgtggtggcwtgtgcttgtagycccagctgcttgggaggctgaggtagtagaaycsctttaacccgggaggcagagattyctgtgagccaagaccatgccattgcactccagcctgggtgacagagcaagactctgtctcaaaaaaaaatcctgtctcacaagaaatacataaataaaaatgaaaactatttcctatrggcyaagactgaagaaagtactgttgttctaatggtttcatagaaagttaatgccaccaccataggctcatgagaggccatgaagtgctttaatgggtcttaaatgggaggggcttcartagaatagatgttgaatagaatattttagtcttaagggagctagagatgagacgtgagattcctggggtgttcatggagtgtctattgttggactagatcactctgttgtgttttttccgatgcagtggaaccacaactgccctcaaaagagggtcctgaaccaccagaagaggttcctcctcctaccacacccccagttccaaaggtggaacccaagggtgatgggattggtcccacccgccagccccctagtcagggcttgggctaccccaaatatcagaagtcgttgcctcctcgtttccagcggcagcagcaggtgaaatcaagttgtttaccctctaagggctgcttttcttcctggcttcggtccctaattctcttcataagttaccttctgggtccctttgcttctttgtccagttgtctccattgtcacgccaatttcccctagtccaagttttttctttgctgattcctttgtccatgtgtgctttgagcctctctcatcttgyctttcctcctttcctaggagcagctcctgaagcagcagcagcagcaccagtggcagcagcatcaacagggctctgcccctcctaccccagtgcccccatcaccaccacagcctgtgaccctgggggctgtgccagctccamaggctccacccccgccccccaaggccctgtacccaggtgctctgggccggcccccacccatgcccccaatgaactttgatccccgatggatgatgattcctccttatgtggacccccggctcctccagggtcgtccccctctagacttctaccctcctggtgtgcatccctctggtaagggggcatgggaggagtgagaaacaggaaagtcccctcagtcttaggcattggatattagggtcttactgtgaytctggtaygataggttttgcccatcatagtgatgagggaagggcatatgcttrgcactgctgagatagctctgttgcaaaaatgggcttagttaagaaataagcagtggttggccaggcattgtggctcacgcctgtaatcccagcacttagggaggccgaggtgggcagatcarctgagttcaggagttcgagaccaccatggctaacgtggtraaaccccatttctactaaaaatacaaaaaagtagccggcgtggtggcgctcgcctgtagtcccagctactcgggagactgaggcaggagaaacgcttgaacccaggaggtkgaggttgtagwgagccgagattgtgccatcgcactccagcttaggcaacgagcgaaactccgtctcaaaaatgaatgaatgaatagcacaactccatctcaaaaatgaatgaatgaatgaaagaagcagtggtccttcatttgccaggatttatttggggtgggttgattctcttgtagggaatctgagtggataaccttgttatataagagcaggcaaggcccggacctactgggaacaagagatggaagagctgacttgaccgcraggggagatgctttttgggctggagggcttgtgacatgaataggattatttttctttttctttggtttcttcaggcctagttccccgagagcgttcagacagtgggggctcaagctcagagccatttgaccgtcatgcacctgctatgttacgggaacggggcactccaccggtggatccaaagttggcctgggtrggagatgtcttcaccgccacacccgctgaaccccgcccacttacctcacctctgcgccaggctgcggatgaggatgacaaggggatgaggtgagtcttggtcatgagaaatgggtgagttcacagtgaaaggatctaggcctgggagaaaggtactttgggttagtggtagggatagggatgaacgggaaaggagaggctggatggagtggctcatgcctgtaatcccagcattttgggaggctgaggcaagaagattgcttgagcccagcagttcgagactagcctcggcaactggatgccrtctctgccaaaacaaacagaaaaatagtaaaagagagtctgcatcataataaagtgttcttttcccacctagttctggttttcctgagatacttatttccattctttctgtctktctcttcaggagcgagactcctccagtacctcccccaccaccctatctggccagttatccaggctttcctgagaatggrrcccctgggcccccaatctctcgctttcctctggaggaaccagggccccgtccactcccctggcccccaggcagtgatgaagtggccaagatacaaactccaccacccaagaaggagccccctaaggaggagactgcacagctgacggggccagaagcaggccgaaagcctgcccgcggagtcgggagtggaggccagggccccccmccaccacgcagagagagtcgcacagagacccgctggggccctcgtccagggagcagtcgtcgtggaatccctccagaggagccaggggccccaccccgccgggctgggcctataaagaaacctccaccacctacaaaagtagaagagctgcctcccaagcccctcgaacagggggatgaaacccccaaacccccaaagccagacccactcaagataaccaaggggaagctagggggccccaaggagaccccacccaatggaaatctttcccctgccccaaggcttcggagggactattcgtatgaaagagtgggtcctacctcttgccggggtcggggccgaggcgagtattttgccagagggaggggttttcgggggacctatgggggacgagggcggggagsccgaagccgggaattccgcagttaccgagagtttcgaggagatgatgggcgtggaggtgggacagggggaccaaaccaccctcctgctccccgaggccgcactgccagcgagacacggagcgagggttcagagtatgaggaaatccccaagcggygccggcagcggggctcagaaacaggcagcgagacccatgagagtgatctggctccttcagacaaggaggctcccacacccaaggagggaacactcacccaggtccctctcgctcccccaccaccaggagccccaccttcaccagcsccagcccgcttcactgcccggggtsggcgagtcttcactcccagaggggtgccatctcgccggggccgaggaggagggaggccccctcctcaagtttgcccaggctggagccctccagccaagtctctggctcccaagaaacctcccacaggccctttgccaccaagtaaggagcctttgaaagagaagttgatcccagggcctctgtcccctgtggcgcgcggaggcagcaatggaggtagcaatgtgggcatggaagatggggagcgaccccgaaggaggcgacatgggagggctcagcagcaggataaaccgcctcgtttccggaggctgaagcaggaacgggagaatgccgcaagggggtctgagggcaagccctccctaacccttccagcctccrctcctgsacctgaggaggccctcacaacagtcacagtggccccagcacctcgccgggcagctgccaagtctcctgatctgtcaaaccagaactcagaccaagccaatgaggaatgggagactgcatcagagagcagtgacttcaccagtgagcgccgaggggacaaagaggcacccccaccagtactgctgacacccaaggctgtgggaactcctgggggaggtggaggtggagccgtaccaggtatttcagccatgtcccgyggagatctgagccagagagccaaggatttgagtaaacggagcttctcaagtcagcggccaggcatggaacggcagaatcggcgccctggcccagggggcaaggctggcarcagtggcagcagcagtggaggagscrgtgggggtcctggaggaaggaccgggccaggacgaggcgacaagaggagctggccctctcccaagaaccgaaggtgggtaggaacaaacaaatttattgtggtttaaaaattggaggagggggrraaagcctgagggaaagataagtttgggtgkagtggagattgtggcctgaggggccatgggctctagaatgtcagtaggatttccatgtctggctaaggcaactggaaagcggttggtagggtgttagagtcaagaacacccacctatgtattcattgctggttctttgctttccagtctgtgcatctgtaygcataggaayccttagaaggactcaaaaacacctggactttaatagggaagagrataggttgtaagcagaagttgggaaacataacttgtgggaaaaartaacgatttagtggatactggagctaatgctctgttttctccagtcgtcctccagaggagcgtcccccggggcttcccctgcctcccccacctcccagcagttctgctgtcttccgcctggaccaagttatccacagcaaccctgctggcatccaacaggctctggcccagcttagtagccgtcaagggagtgtaactgcaccagggggtcatccaaggcacaagcctgggcntccccaagcccctcagggcccctctcctaggcccccaacccgatacgagccccagagggtcaacagcggcctcagttctggtaagctggaggggttatgggtgggaatatctccatccccagagaaggtcaagtgctggagggagcgggtggagaacctggcctagggrrcctgcygctgggtgcgtttctgcagggagcaagggtagaagaattgggaggtggagtagagaggaaaagttagggtcagtggcagagccaggcagatgctgaccctttttctctttcccagacccccactttgaggagccggggccaatggtgagaggggtggrtgggactcctcgggactctgccggggttagtccctttccccctaaacgtcgggagcrgcctcccagaaaaccagagctgctacaggaggtaagggatgggtttgagattgtgcttcactgcactcttactcgtgaaawttcttctgggttatgttttctctgttytctttcctgtttctttcactgtgtttttactccagaattctcagtattagtctcccatgtgtctcccttgttgtccccacaccctgtgtcaccccactctgtcctggcttcctataattcccaattcccacccaattcatgttttgcttctggcccttctcatctgtaggaatctttgccacctcctcatagctctggattcttgggctctaagcctgagggcccaggccctcaggcagagtccagagatacaggcacagaggccctgacccctcacatctggaaccgtttacatactggtgagtaaagctgagtgaaaggactatggtagaagggttaagaatgagaggggcttctgaactgtcatctcctcacttctcttctggttggtgctcccttctccagccactagccgaaagagttaccggcccagctccatggagccttggatggagcccctgagtccttttgaggatgtggctggcacagaagtgagtgagggtgggagggtgtgtctgagctgggacttttttgagcactggtcataccccccacctgctctggkttgagtctggagctgttytctcacttggctgtcccctttctgcagtttgtatgtgtgcatcagtcaggtattggggtgctytctaccctgacttaactagctccttctccactcctctcagatgagtcagtctgacagtggggtggacctgagtggggattctcaggtgtcatcaggtccctgcagccagcgaagttcccctgatggaggactcaagggggcagcagagggaccccccaagaggcctggaggctcctcacccctgaatgctgttccttgtgagggtccacctggctctgaacctcctaggagaccaccacctgccccccacgatggggacagaaaggtaaaagaccaaaaaaggataaggggaatgtttccaggaatctgactttggccctacctttttctgctttttctctctgcgtgtgtgttctgggcattccaatttggatttccctttccctcccccaatgcactttactgtgtgcccaatccaggagctgccccgggagcagcctctgccccctggccccattggcacagaacgatcacagcrtacagaccgagscacagagcctggccccattcggccatcccatcgacctggtcccccagtccagtttggcactagtgrcaaggtctgtgtgggctggatctgggtatcctgagttgggtggagagaagggaaggactaaaggtgggacatagaggacacatgtctgtcacgggacaatgtctcctgccttcttgtgatcacaggactcagacttacgcctartggtaggagacagcttgaaagcagagaaggagctaacagcatcagtcactgagrtaagtgggagtaagagtttggtggaaaggcccaagatttctggggaagattgctgggagtgaccagggcgtccaggatgccagacatccctctccacgaggcctctccttcccaggccattcctgtatcacgagactgggagctgcttcccagtgctgctgcctctgctgagccacaatccaagaacctggattctgggcactgtgtcccggagcccagctcctcaggccagcgcctgtatcctgaggttttctatggcagtgctgggccttccagttctcaggtaggccccgcttcccattgcatgaccccttcagtgaataataatttttttctgcctggtatgtrtttataatcaagcctttctacgttgcagagttgtgagataccactttgtcacatcatttttctccctactttttgcttctatgggtgggatggtgatcttttttcttgaccacagatactaaagctgtttcaaccgtgctcctctcctgcagatctctgggggagccatggactctcarttacatccaaacagtggaggcttccgccctgggacaccctcactgcacccttacaggtaagactcgatgcctgtggatcacagaagtacttggagatgtgtttcggggagagggaaggggaagacacagttctagggtactagaagctagtggacttaaggcattgctaggactctggcttcctaacagcttttctccccacaatttattttcagatcacagcccctatacctacccccsggcccagcccctccctcagcactgctctctgggktagctctcaagggccagtttctggatttctccacaatgcaagctacagagctggggaagttgccggctggaggagttctctaccctccaccttccttcctctactctccggctttctgccccagtcctttgcctgacacatcgttgcttcaggtaagaggggggcaggtattagatattgggggatagggtagggagaatgattttgtgggggttgatatatttctccctgtttcccgacaggtacgccaggatctgccatccccttcggatttttattctactcctctgcagcctggtggccaaagtggmtttctcccttcaggggctcctgcccagcaggtatattgtatcktcacacttccccttcatttgatttctctgtccagttgctggctttgattttccctggttttctgacattcctccctgcccccaacatgcacacccaaatttcttgttacagatgcttctacccatggtagactcacagctgcctgtggtgaactttggctccctgccgccagcaccacctcctgccccacctyccctttctctgttacctgtgggccctgctctgcagccccccagcctggctgtgcggcccccacctgctcctgctactcgggtgctgccttcacctgccaggcccttccccgctagcttggggcgagcagaggtaaggtacaggaactgaggggctagggagcgccaagacttgggagtagggattctgtatttcaaggtaggcagctcatgatttttttcccctcagctgcatccagtggaactaaagccgttccaggattatcaaaaactgagcagcaaccttgggggacctggatcatcayggactcccccaactggaaggtgaaacggaatagggatgtggactttccaagtgcttccttactttggaaccagggtctggatcctaggcttgccttagacgcccttcttcccttaggtcctyctctggcctcaattcccgtctsaaggccacgccttccacctacagtggagtcttccgcacccagcgcgtcgacctttaccagcaggtgaaggagaaacccttgtggccccaactctaaattygagttgccacytgatttcctgtccttccrtctcatcgctgacctctcactgtgactcactstttaacacatgcctgtcccctaggcctccccaccagatgccctgcgctggatacctaagccttgggagcggacagggcygccacctcgagaagggccctcccgacgggcagaggagcctgggtcccgaggggacaaggagcctgggttgcccccaccccgctgagggagttcctcttgccccctacccccggggcttgtatatagattataaatatataagggggaaaggggtgggcggggaggggttstggggctggggcctcacttcccctcctcccccttcccctggtcccctgtccctggggctgtttgttaaaaaagagtaataaaaggatttaaaaaaaaaaacttctacaatgatttgggggatgagttgtttgcattgtcttaaagcatggtgctgagtgatctgtagtttcagtcagggaaatattcattacttattccagtgagctgttgaaactaaaaacatgaccatcgtattggatctttaaatttttgtgagtctggaatttgggctgagctcagctggataaatctgcttttttgtgccagtgagcgaggtcaactggttatcagtctgcagctgacacctgggctggtcccaatatggcttcctttgcatatctagggccttggtgggacatctgtaacattactgggttatcaaccagtgtcttcacatggactctccagcaggcctgttaaatgtccgtgagctcatgttccaagaggtctagctggaattttctaagcttatgccatgcttagttgatagagcactaaactagccaaggtaggggatgggggggtttagaagggacttcaactgcatctcaaagggactagcaaagaatttgcagccatgggacttcagttctttatgatgaactaaggggaaatctctgttaaggcctcaatgttggagcacacttaaggggctctttgaattggatagaccaattccagcattgtcaaactaagtgggatttcacatggtaacgctgcatgctagttatgctaaagactatacttaggtctgcagctgctcagaaactttttttgatgggtaatttgagagctctatgctagtgtgcacctggaatatgctcccaactcaaaatacaggttttttatttatatataaagtgctttcgcacaaaaaatacaaacarcaggctgggcgcggtygcccacgcctgtaattccagcactttgggaggccaaggcgggtggatcacaaggtcaggagttcgagaccagcctggccaatatggtgaaaccctgtctctactaaaaatacaaaaattagccgggcgtggtggcggacgcctgtagtcccagctactcaggaggctgaggcatgagtgagaatcacttgaacccgggaggtggaggttgtagtgagccgagctcgagatcgggccactgcactccagcctgggagacagcaatactctgtctcaaaaaaaaaaaaaaacaaacatcaaaactggcttgtacaatttagcgtgctgagtagaacacaacagtgttccaaggaagtattaatttwaaaaagttcacacaagattaagggacacactacctaatggagacaatgtagagagaaagcagccagaaaaatccgacttttatttcttaaatactgtgaaggaagaggggggaaacggtcccctgatgaggaagggccatagagcaaagagctaaggatcatcagcaaaggcccgctggscattggggaagcgctggggactgtagttggggtcttcctgyagtcgtttttgtatatcagaccggagctaaagagaaaaagyaagcaggttggagaaasgctggccaagtcccyatgatcccagcaagcacacaaggccatccctcagaagctaacatttccccccccaagcacrctgtcaaatagcccggggtggcactgtcaagccttcccagatgccaaaggggaaaacaaatggtagcaccaggctgaccagttcatcgctgaagggatccagggaagagggaccctagcccaacccctcccactagaccatccctattctgcttcaaggtggcacctgctgcctgtagctctcctgaacctctggtgcctccaggtcccggctcaggctctcggggctcgtcaggggccgagctccggctgccttagctgcccggctcacagcctctgagagaagcagctgggggccctcaccctgcatcgtctgggggacagggggttgggagggaaaagaggatcaacgtcagatccagtgccaccatccggctcaccctttccatgagtcaaccactccactgagtctccatgctagtggagagaggggaaattaagagtccaggatgtggtttttacagcagaaatgccttcctaattctctttggcactagccaaaactaaagtgaatgtgcttgaacgtgctcttcaaaacgaaaggcagaaggggtcaagccatccgggattcagagctaggtaatccacaagaggaaacccaccttaaaggaaaatgggatctaagcacatggggattaggcagctgagcaactaatacaggactgctagcaaacagactaaggtcaagtcctgtatggttatgcaacaaccaagagcaagtctgaatcccagaaaaagtttcctcattaaacgaggggaggggagactgaataacaagagctcccaccatctctacatagtttgattccaggcatgacggggaaacctggayagagagagaggcttagggaagaggaaaaccaaccttgcgtctcttggcaggcataccactgaggtaggcatcactcagagggggctgcggtttcaccttccgctggctctgaatgtcctgctggataatagggacccattcctggggaggaaaagagaaaatagtaatgtccttgactttcagctgccatgacccactggattacttcctgacacttactggggggactgcagctgcccaaggttctgtctcagctgaagctccatcctgttcatcccgggagcccccctcaggagcaggaggtggacctcgggacatggcctcttctgctgttgttccaggggctggggaagcattctcccgctgggtgtcagatggcgggaagagccaggcttcagaatttttagcctccaaacctttctcccccagccctccactccacattatctggcccctcaacctccccctctctagagtacctgaggctcaggggaagctctttctgctccctgaacttccattggctcctcaggaagyggctgtgaaattaaagaacaccatacttcctctcagatctctccagttctctcaagtaccctgaccccatcgcccaacaggtcccttacctgggggggatcaccaaccctgcgaacgtatctgagaatggcatcagggcctacaggcatgtgctccagtaccacctgaagcctcagtcccatcatagtggtcagccagctcaccaaggagggattcaccccacgagacatacgacgctgagggacagaaagcagatttagaacacaaaaccctcaaccacctttagaaatagattagatccaggttacagaatgtcagtttagaaaagaaaaatgaaaactgcagagaatggaaacctcaggaaacaaaaggctaaggatctggggctaggtggtgcttacaattcggccattgataacagcagcaagctccatctgctgtccccccaagcagtgcaggtttagggccaggcattcaaacaggccttggttacacaactccagcaaccgggccccaaatccactatctgtgggcaaaatacaaggagggaatgctggcacgtggcagccctgcacatgcaacaggccccmcttgcccccgcctggccagcccctgacctgtgcaatgcagcacatgcgcagcaatgctattaaactgctcttggagaaattccaggtttgtccggatgatgtccacacctggctgaacctgcaccaaggactgagagacaagataacacaaagatcccaaaatcaagaatcataagactgggagtggaggaggcagctgcctygaccagacccaggagaggaaaggaatagagaagggttactcacaaaactctcccgcacatactcttctagccccgtgatcaatgtgtgggttgccatctgtggaggaaacagaacaggtttagttcaaagcctcagtcctcccaagacttccacctcgaccccaacaagtccagggcttgtgtgggggcaattggagctttacctggcagagaagcagtcagaaataaggaataaaatgtgcaaaagaggagagttctggggcccctggccttcatttacccggatgttactgggtgtgggctcctgaccacccaggtagtgctggtggaagaaggatcgcagctggggctggagccgttgtagtggctggaaatgcccatggagaagcatcactacgtccaccatagagaagttctggcacagaagagaaagcaaggccccaaagaatcctgggggacaagggcagatgttagcaatggcctttaccacctggcctgcccacccacaaccagatcatcaacctcatcccaccttggcaayacccctaaaccaaggccatctacattcctctggctgccccttcctggagcaagccaaagcatcctttttgctcaccaagggccccatcagctccaggctcaaagatgttgctggatccactgaggcgttgtatgaaggcagcaatactttcactgctgccagcccgagcccccagggagcccagcagggagctgagcacaccctgcaccactgaggtaaaaaactccggtgacaggctctcaagacccaggcctccaggactccctgcgccaccagaaggggagcctggtgggggcatggtctgctgctctggggcaggtggtgggggtggaggaggtgggggtggtggaggggctgtctgtgttgcctggcaaataaagaacaaagaacagaaagtgaggtgagaatgaagacacacggaaataatacggcatcaagagggcacaaaccaacgggtctgggaagatggggagttacattctgatcttcactgcttaaagcagaagtatggtaggtatttaacagagtcaggcagcacaacttacctacctcttcctctgaacaggytgtcagaaagcagtgacactaattactatactttctttttctaaacctcattttcttcatctttaaaatgaaaggttcagagtcaatgaattccyagggccccttcccctaacatgtcactaggggctcttacccagtggttatrtaatggcaagaaggtaccactgcctggctgggccgggggacaggaagatgaggtgaatggcaagccagccactcacctgcaagaagtcagtcatgccttggagaaaggcagggacaccaggcatcgccacagtgatggtgggagaagccacaccagrccctccagcccctggccctgcaggccctagcaggttccccagaagctgagagaactgaagatcagccatggagggttgaggggtgggtggaggctgggcaggccccccaggagcggggccagctgtggtagctgtgttggtggtgccagcactggcagaagcagtggcaggggctggcggtggagccatacctggggtcccctgagctgtaagaaaccaaaaaaagaaagctgggctgagcatggtggctcttggctgtaatcctagcaactttgggaggccaaggcatgagaactgcttgagcccaggagtctaggccacatagcaagaccccatctctaccagaaaaaaaaaaagacaattactagccaggagctagtactgctagctactcaggaggctgaggtgggagaactgtttgagcccaggagttcaaggttacagtgagctttaactcactggattgcaccaytgcactccagtctgggtgacagagcaagactctgtaacttaaaaaaaaaagaaaaaagctggccgggcacgatggctcaagcctgtaatcccagcacyttgggaggccaaggtgggtggatcacaaggtcaagagttcgagaccatcctggccaacatggtgaaacccccttctctactaaaaacataaaaaattagctgggcgtggtggcgtgcacctgtagtcccagctactcaggaggctgaggcaggagaatcacttgaacccgggaggcagaggttgcagtgagccaagattgtacactgcactccagcctagcaacagagtgagactccatctcaaaaaaaaaaaaaaaaaaaaaaaaaaaagctgaaacctgaagacacaagacactacagcagccccattccaggaaagcaggaaccaagaaaatatggaaagaactggaaagtgccagtgagcagactaggaaaggagtttaaactctgagtggggaagaatgaaaactcacccacaaggactggctgcataagaagctgccccacaaggccgctcaccatctgggccaacgaggcattggtacccagaccrgcgccctgctggatagagagcaagggagaayttcagacctgcccttccatgcaccaccacaggagtctctccctagactgttacgcactagaamtccccgacccttgctcaccagtgtcccagagactgggggccctccaggatgggaaggccgagcctgtggaggagtgggccgggcaatcaccacccgggttggagctgttgggaagcctggcacctgctgtcctgtgggtggcagaagagacagaccgaagagggctgagggccaggcccttgccagccagctgccaccatggactgtgccctacctcccaagcctccccttccaggtcattacctgcggccgcggaggcaacagctgccaccatggcctgatgagtgatctggtgggcgacggcgtgcatgaactcagggggcagggagggcagctggatgagggtggagcctggggggcgggtctgatgtaaccttgaacctggaccccttcaacccacccacwcagcccttccctttctctacccagagctcagcctgccctgatgccctcactcttacccagggtttggccatgaccagggggtcccagggggccagtgggagcactcggaacaccaccaggctgtgtgccagaatctgggcagggagacagagacagtggccctgaggtaggtagggccaaggcctaactatatccttctgagatcaggcatacttcaggcccataatcccccaatcagaaagcctgcctttccctccatctaaacagggagaggtactcccttcaccacacaaacacacctccaaagacaaaccaacccccacaccccccacatctgtctacttaagcttctgctctggtccccaggctaccaccaccagcatgtgcctctcccttccccaccctgttccctcacacctcagcatgaacctccctcatcatgctgatcctgctcttctcgccagcaactattctcaccttgaatgttcatgtgcatcatgaccacgggttccacactctggtgggaaatccggatgaccctygggtggctggtggctggcgggggagctggacctggcgggggagccccctcagctgaggactcgacattggtagaagacggagccacggatgaggcctgcccaggaccagggggaggtgcctctgcattgggagttggggggggccgagtcccatttcctgtcatggtcacagtggttcccacattgatctgaaaaagacagatggacaggcagatgtgagaaaaatacaagagcctaaccaagaaaacctcatgataaacctctaaagtatctccagccttcatcaccatgtttccagtctcctcctttcctaacctccttcaggcccagtagctaccctgggtcactctatcaacacccctcactctccctcaggccagactccccctaacccacctgtatgggaatggctgcctgctggagcaccatgggggtggtgtagtgagacataggccggaccacatgcaggtgtcgtgggggcgtgcaggccagattgcagcgcaggtcagacagtgcaacaaaggtgttgcccagcagtcgcaggctctcccctaccaagttgatcaaccgctgatcctcctcccggccctcgtgctgcgcacaaccagccaaacacaaaaaggcagaaaatatcaagctggagtccatctcactaataaaagcaataatgcctactgagaataccatgtcctccaaaactttcagttatatccttggaagtttacatgtagaccaaatctttgcaaataaattatatcttattcacataaggaacatcctattaaaacactactatgaatcagtaagtcatcatatactgatctcctgtactttacattttctaaattcattcaggggcacaaggggtacgatacgaggacagtgcttacagcaaagattatcaccttctctgtaagggaggacaaaatcacttacaggtttagagagaaaytgttttgttgcaatgtgtgtttttttgttttgttttgttttttgagacagtctcgctctgtcacccaggctagagtgcagtagtgcaatctcggctcactgcaaccccctcctcccgagttctagcgattctcctgcctcagcctcctgagtagctgggattacaggtgtgcaccactacatccagctaatgtttatattttcagtagagatggggttgcaccatgttggccaggctggtctcaaactcccgatctcagatgatccgcccaccttggcctcccaaagtgctgggattacaggcgtgagccactgcacctggccctgttgcaatgtttttccagggagggaaagagttatctgyatttcagcctgttctgttttgggagtactggggctgaggagaaagggcagggccatcaaagggctcacattgttattgtagtccgtggtggcagcagcacccagaacctcgtagtagcgctgcaagaagggctggaggcgactctccagccgctgtagctcctggagcacctcgacatactccgcaggggaaggatggctgtggacaaacccaaggggcaatgagccaaagccttcctcagattcccaccctcacagtcaacagggaccacatgtgccctctttctccctggtctcccagagccctggcccaatccttctctggaccagcagagcttctattctcttcaacctccgcctcccaggttcaaacgattctcctgcctctgcctcccaagtagctgggattaagttgcctgccaccacacccggctaatttttgttttttttttttttttttttttttgagacagagtctcgctctatcacccaggctggagtgcagtggtgcgacctcagctcactgcaagctccgtctcctgggttcacaccattctcctgactcagcctcccgagtagctgggactacaggtgcccgccaccatgcccagctaattttttgtatttttagtagagacggggtttcatcatgttagccaggatagtctcgatctcttgacctcatgatccacccgcctcggcctcccaaagtgctgggattacaggcgtgagccactgtgcccggcctgtattttttagtagagacagggtttcaccatgttggccaggctggtctcgaactcctgacctcaggtgatctgcccgcctctgcctcccaaagtgctgagattacaggcatgagccactgcacccagccaaagcttctattctttactcccacccatgagaggatagggagaagaaaatgaactgctcccaccctccccaccacaatcctgcacctacaatggtgaaagactaattctaagaaagagagcaggccttcgtgaactcagaggagaattccgatcaggctcaggagataccatttggatttccttgccatagggagagcagcagttcttctcagctgcctgtcctagcgtcatttacctataccgagagagcccctcctcgcccctcaatgctaacccttcaactaagacctccaagtaatcctttccctcccttgccatggttcatttccttctccccatacttcacttaggattccccacccactaaagattccctccatctctcacttgggtgcatttgtttccggggcaggtgttgggcccgctggggctgggccaggagtgagctccgggttctgggctggggcacgctcctccacttcttctgcctccatgggctcccggggaggtgcttcactttcaactggttctgaygtttgagagctcaaggctactggctccggggtcacagccggtggctgcgggggcggctgactgtgctgcggttggggccctcctcgacactgaaggtaggggagagtcaggataccaaaggcagggtaagactgctgcagaggattactctacaggagactgaacagagaaagtatcctaactagactccctgaaggcatggctctgcaattttatctccgactcgctagcaactagcataagactgacacaaattagatgcataataagcatctgtaatttttttttttttttttgagacagagtctcgctctgttgcccaggctggagtgcagtggcatgatctcagctcactgtaacctccgcctcccaggttcaagaaattctcttgcctcagccttctaagtagccaggcctacaggcgcgtgccaccacacccaactaatttttgtacttgtagtagagacagggtttcaccatgttggccaggctggattggaactcctgaccacacgttatccccctgccatggcgacccaaagtgctgggattacaggcaggagccaccacacccggccacagcatctgtaatatttgtaaataaatttctaacaaagagtagagattgtggtttcctttcctccacaagttggtttcccagcctccacaagttaagagagtagaatcctttaattgaaaagagatgccatgagactaagtctgaaacaaactccccagataccaggcaccaagaggattggcagaaatgagagagcctcacaaagatactttttctgcccaaaagaatgaatactgcagagaagactagattatgaaggccaaaccctgtggatgtggccagtgaagccctaactcccaggctgagagaaaagggagagggagggtggagagagaccctagccagccttgcccacttacctccatccgggatagtaaggtctgtatatccctgatcatgtgctgagccatcaccagccgtacccggggctcactctacaatgagagaaggtttatcagggtaggttrcagatgaagccatgagttctaccacctactaaatcaggtcccagccatctctcagccaggtccaccccacctcccagcctccttctcccagatccccttccctgaccctcggaggcccctcaatacctgaatcggggcctgttccatgttgatgtgaacatccacagcagagccgtcactctggggaaagggtaagggaagttgttctgggagaagccaacactaaggcctccacacctccaattcattccctggagccctacctccttttctccttaaagactgagaccaatagcacaccacagggccccctgaacccaatctaaagatggaagcatctatcttattaattccctggtgctaccacaaccaaagctacccacaaaagccctcccctgtggaacataagcttacaggaagattgaaggttccaaccatgacatagctgttggcattccggtcatgaacagaggccccaggcccccgagtaccagggggggatcccccaccatgagtggctgaggcagaccccgtcccagaagatgccccagaagggaggtgagtctgaggaggagcccgttccaccaggtggataacctttcccccaacatctgcagaaaaatagacacacaccaaaacatagtatgaacaggtaaacccatggcctcagttcatccctccagacagtagccccaacctctgaactgcctccccagcccccttactgtattcctgaagcttcttatcatcttgcagaactcgtccctggtaaatgagccgttgtttttcagatgggatgctgacagaggcagcaatgtgctccttaaactcttttacattcatctgaaaagaagaggcatgcacaggaatggaaagaatggaggaaagaggaagaacaaagacagacaaccgagttgtggaggtgaggggtaaaaaccaccacagaatcactacccgtttgtcttgaccgtgagatcattactgtgcaaacccttaaactaaagtaacagctgtcaaaatacagacaataaatttggcttggcgcggtggctcacacctgtaatcccagcactttgggaggccaaggcaggcagatcacattaggtcaggagttcgagaccagcctggccaacatggtaaaaccccttttttaccaaaaatacaaaaaaataagccaggcatggtggtcgcctgtaatcccagctactagggaggctgaagcaagagaatcacttgaattcgggaggcggaggttgcagtgagccgagatcgcatcactacactctagcctgggtgacagagagggactccatctcaaaaaattaaataaataaacttaatgaagctcaggttatagatccaggaaaaataacacggatgaaaaacaaaaaaaaaacacatggacattatattatctgtctggcatccaagggagtatgtgtctagagacatcagtgacccctttccaaacacaagatgataccagtttatttaccagactctcctgtgatttccaagattaaaaaatggcaaagaagatggggtctggtatcaggttaatgaagaaagactaagaagataagaaagcaaaaaaggtcccagcacagtggctcacacctgtaatcccagcactttgggaggccgaggcaggtggatcacctgaggtcaggagttcaagaccagcctggccaacacggtaaaaccctgtctctactaaaaatacaaaaattagccgggcgtggtagtaggcgtcgtctgtaatcccagatactcaggaggctgaggcaggaaaattgcttgaacccaggaggcagaggttgcagtgagctgagattgcgccccagccctccatcctgggcaacaagagcaaaactccatctcaaaaaaaaaaaaaaaagcaaaaagagaaatatttttcctaactacaaactgactcttgggaagtaccagagtatttatatacatctaatcacaagtctatatatggctttcttatatccaggtaatatcacattttagaaaaccatggaccaccccacatgcaatttgtctccaagtattacaggagtaaagacacagatagctatgtccaaggctttaagctcaagagactcaagctatgccataaaaattagtaatttcactcaacagtctatcaaggacctatctccattatgggttctgatttctaccctttaaaaacacagcatagacctgaccaatgtctatcagtaagacacacttgcttagggttcctgtgctgtttcccttcccaaaggccagagccatgcctgtccctttgggttggggtccacccatgatgatgacacacagattcttccttcctctgtatttccctctgcattaagttctatccatgtggaggacagaacaaaatcagcctcactcacaaaacatcagaaaacgttctactggaatacraacaaagggatcaataaaaagaaaatctgaggccaggtgcggtggctcatgcctgtaataccagcactttgggaggccgaggagggcacatcacctgaggtaaggagttcgagaccagcctgaccaacatggtgaaaccccgtctctactaaaaatacaaaaatcagctgggtatagtggcacacgcctataatcccagctactcaggaggctgagataggaaaatcgcttgaacccaagaggtggaagtttcagtgagtcgagatcgcgccactgcactccagcctggaagacagggcgtgactccatctcaaaaaaaagaaaaaaaaagaaaatctggtgaccagaaaatcaagctcatctctcaggctaaggggcctaaacgaggaaaagctaaaggtgtcttccagaactagtgaggtgtctcacctgggcccccacaataaaggtacgagtttgagagtccaaggtcttcaccaacacctccaagctgtcaggctcctccacagcggtactggtactatcattaggctccatggccgacaggtctctaaagaagaacgaaggaaggaaggcccgctgttgcccagaccagagtgtacccgaaagactccctagcattaatccctgccccaatacctaaaaagtttctcctgcacacacacacattcacacctgtccccatcccccttctgattccggggcacagggagagaaacacaaagggcaggagatcgacggcttagggagctggaggacgagaggtgggaggggctccacgacgccaatcacaataagcagggagccagtcagattaggaaggaagcacgagaccagagactagtgtcatcaccggtcacggcaggacaagcgccccagaggtcggaaaatcctgggacaacgcgaaagcggtggtcgccccacactctgcggagaaagtggtttcgcgcacgcgcgccacgcccatcgaaccctcctaactcactatagacccgaaacggcactcacggggcgacagacctgctagctgactgcccgcgtctactgccttcccacggtgttccagcagaacggcacaactaacccacagccaaacacacacacacacacacacacacacacacacacacacacacmcaccaccccgcggctccgcccccgacttccccacggaccgtcacttccggtctcccccaaacctgccaccgacggccacttccgtttccccgatagtatttggggatctcgaagcgatacttccggctccccccaggtccccaagctttacttttgtggggcacgacgagaaagtccgcagccccaaacagtgagtttctgagggcgagtcgggccggggccggcctakgtgggagggagccgagcaccccgaggagccgccaccgctgtcgcccgggggaccgtactacgcctgcgtgcgtcgcactacggatgcgtggacacttaagcatcgccccaccccctcccccctctggcggcgttcacgtctgtgcgcgcgcttgagcgctagaagattgaggtggctaccgtaaatgcctgaaaaacagtcaccagctgggactctaccactgcctcgagaggggctatggacggtcgtatggaccttggactttggagatgggggattatgccacattcatctatgtttaaatcttggcaggctgataatttcaggcggcactgtcctagccagctaaaactcttctccaccctattgccctcgctgcgccctttcttctgtgcctccggaagttactctttcagtaggcgtttgggggcggcactggtcaattttgttctcggttgcttggttgggctagatttcggttctgccgggtgggcgttttaagggctgtgggcgtcacattcgtcggtgtgtggccaaggggacatgacacgttttaggaaaagt

SEQ ID NO: 8820 - DNA, 23883 bp, Homo sapiens
agcaggctgccctttcttcttcctaacttctcctgcacccctactccctagcaacggccctggacaggttatcagggtatgtcagtatccccatggctttggaggtgctgctccaggagagaaaggaggaggacaggccgggagacacagaggagacccgaccctcgagacaggcatgggtcggtggagatgttcctgaatccacaggtccaccggcacactcaggggcccagtctgtccggcacaggggtctggatgggcgtcagagttcagttggctcctggcttggagaattgcaaagcaccaaggctccgggacactggcctagtaagaacctgcccccagaaccctctctaatgaggcctgacaccctcttcttccctgagagggctcaagacaggagagggagccctggcccatggtccccgccagggttcttcagcccctaggctctccgcttccttgaatttctgctcccagaatcagaggctacgggaacaggacagactcctggagggtgccccaccaagagcccccaaggcctgacccatagggtcatagtgttggcccaggggtgagcagctggcaagagccaaacaccaggccctgcaactctgtgcagctgccagcccccaagtgctccctctccttcctgcctcacacctgaaattctcaacttgcaacgcacccccacaccctacccgtcaggggccagagagggacagccgggatatgcctcctcatggttgagtgtcgagaggccacacgagaggaacgtcataccccacacccctcccatgacctaatacatcagcgactgcaggccagagagtattggggtcagccctggaggggtcccccacagagggtagctctgtcacctccccaccactctgaggagagcaccccatgcccttgggctggccctgccatcctggagagaatctagtctctccccgtttcccatctgagcccacctgggagggaccaccatcctgcccaggagcagccctagccttggttctaagctgcagaggcttgagatggatctggttcagaaatgcttcagagtctgaggctggtggccccctttaccccacatcaaagacgggtggacctcgtgggcctggctgggacacctgcagatgctgagcttcaacaaggctcattctgggacaaaagtgcataccggaggtctttggctggtgcctgtggggctggattggcatctgtccccacaaagcagtggccctagaaggctggggtctccagctagactttgtccttttccctttcctccttgtccaggtgcctcatgctccacagcgagccctcgagacatgcaggaaggatggatgtcccaccccttccgtaacagagcccaggagcagggaaggaagtggtttgagcacagtgctgagctaagcaagttttagaagcactgaatcagaccacgtgcagccagtaggggaggagagaaactctgggccggtgtcctggaggcccgcgggggacaggggcacagaggcgcagactcaggatgctgagctgggagaggaatcccggaggaaagtgagagggcttcagcacgtttatttaaaggggatggtgagaaatctaggaaagagtgaaatcccaagatctgagggtttaagtgagagaggtaggtagagactggagttttgggggagttcccgtgggtttcagggcttgcttgagctgtggatccaaggcctggaggacagggtggggccagaacagattccaccgacaagggcaggagccaggttgcaggcatcagagaggacaggtgacctgtcggggcctggagcaagggcccgggcagcttcctccacaggccatgtgaagacagagccatggattgggaaaggtggagactccgagtgtagaggtgtccatgtaacagtgctggctgaatgggggacttccaggtcacaccccaaaaagctctgagccggtgttagtaagaaatggggaggaaggyccagctgtggcgccctgggcattaatcctaaaaaaaaagatactacttctatgtgccagaaacttcaaagcaagtgaacacttcaagtacgagaaccagaggtgtttttttgttttttcttttttcttttgagacggagtatcgctctgtcacccaggctggagtgcaatggtgcaatctcggctcactacaacctccgccttctgggttcaagcaattttcctgcctcagcttcccgagtagctgggattacaagtatgaaccaccacgcctggctaacttttgtattttttttttttagtagagacggggtttccccatgttggccaggctggtctcgatctcctgacctcaggtcatccacctgcctcagcctcccaaagtgctgggattacaggcgtgagccaccccacccggccaagaggtgttaaaatctaaatcagactatgtcatgcctcagatctgaacctttcagtgactgtccctagcaaagccatagcctgtgaggtgcccctcaaggcctcacccgatttcattacttgaggatttatcgtctatcttactctgcagaatggaagctccaggagggcaggggtttttagacaaagtagaaattgtccaccactttatcctggcaggtacaacatgcccgataagcattgttgaatgtagactcacagccaattcgtgacactggtgtcaccattctcctttacagatgggaaatggggcttctgggggagtgaatggcttgcttaggtcacgcaattctagattgcagagtgaggatttgactcagacctgttgacctcagagcctgatgtccagccaacaagttctcagaaactcggggtttctgagaaataggacagtcagcctggggacccctgagagcccaggccgagggggtgggtttcctggggtagaggttttgagaggcaaaggcagttgtcatcaacccaggctgcactgaagggggctgttccagagccagggtgcattgttcagctgcccaatgggcctctgggtttctttcagttccctttggtgacacggcttccctcctcccccctgctccccaccccagccaccccactctacactcgctcacacagcgtagcttctactcgagtcaggggagggtgcctcctaccacaccctcagtctgtgatattccagccaggggaaatgggggaaggggccatctcactgtggggagtggggggcctggacagacctccctgtccccaccgcctcctggcccatcaaggggaaatgggagtgctcacacaagggccgggtgtggcttcacttcccctctacttgcccttccacccccaggatggcactgggaggccaagggatcccagatcctggaaacactggagtgctgctctctgtccttcctttctcctgggccatgtctctggccccagatgattcttggctcaggttctttcagttgagggaagtcaggatctgagccaagctgagcccctgcatagcctctatcccgggagccccatatcaatgctgccggcttggtaacatcatccsccttttagagacgaggaaatgagatttgaggtcctacttaaggccacttggctggaatacagcaaagccaggtgcaagccccttctctgcacgcagcccgtgctgcttcttgaggttcagaggctctaaggaaggggcctcacctgagcaagatggacagtgggaagggggcagagggcagaattctagggtctcacggtccctcagaatgggtgaggagtatttgataacaaaagaaggctcttcttagctattgctccagatacgaccagcatagaatatttttctattaagcataactgacctccagtgaaaaaggttcccattttgtggggagccacttttgaaatagcaatttcattttattattattattttgagataagatctcacttctacgcccaggctggagtgcggtggtgtgcctcctgggttcaagcaattctcccacctcagcctcccaagtaggtagaactataggtgtgtgtcaccacgccaggctaatttttgtattttttgtagagacaaggttttgccatattgcccaggctggtctcgaactcttggactcaagtgatctgcctgccttagcctctcaaagtgttgggattacaaatgtgagccaccgtgcctggcctagcaatttcatttttaaagaaagaaatataaaacgatctacccattcacattttccccatccatactttaaattttaaaaatatgaaataatgaaatactcagcagatacaaataataaaatacttatatataatgatatttcgacttcatattagggcttcaaaggtcaggaaagagggagagatacagaagagaaaaaaaaaaaacgttaacacatgagtgtctttttttaacttgttaaaggtaaagttcaacccaggagaagggaggggagggaaggtcaaagttctgattcatcaacaaatactactttatttgttaaaaatacaaggctctgcttggcgcagtggctcccgcctgtaatcccagcactttgggaggccaaggcgggtggatcgcctgaggtcaggagctcgagaccagcctggccaacatggtgaaaccccgtctctacttgggaggctgaggcaggagaatcgcttgaactggggaggcagaggttgcagtgagctgagatcgcactgctgcactccagcccgggtgacagagcaagactccatatcaaaaaataaaataaaataaaatgaacaatgaaaagacaggagggaggttcctgagtaagctgattcgagtggaaatcagacatcaaaattgaaacccgctgaattttccaaaaagccagatgctcatagaactgaagcttgagacacttacatcagtacacctgctgcctgttgaccaattcctcttccttgtccctcctgttttccttccctgctatataagcccctaactttagtcaaggggagggatggattggaggtttgtctcccctctcaacagctcactggctgatgtcaccggaataaagtcttccctggcaatactcgctgtctcagtgataggctttctgtgcggtgagcagccagacctggaccaaacccctggcaatccataacaaaatcataagcaaaatcaaccaggaagctatttgcaccctggaaccccacctgggaggggaagtcaaggcagactttccagagaaggcgatgctgaaaatttcagaaacagaaattttgaagagcaagagttaccaagcgaagaayattccatgagaaggaacaggaggtgtgtgaaggtggaggttctggggtgaggttctttatggaatcgaaaacggttcagaaccacaggtcgacggtcaaggtagtagtgagaggaggtgggacaggcgaccacgccgctgcccctgggatgactggaaggcgacttaggggagctggggcgagacaggtgcagggtttgaggatgagaaaggcacagagtgactagaggattcccgcctgcaagcacatctggaaggggtgtctggatcctgggggcagcgactgtgttctagggcgagagccaccctcgccaggggtgtaggcaggcgagaggagggcctggagctgtgggtcggccacactgcgccctcatttgtgtgcagccccggaggaccagagtggggaagcaccccaccctctcccagggcccaactgagcactgcagcgggaggtacggggttgtcaaatgacagttttgccattccagattgccaaaagagccagtggccagtctagggcaccgcgccgtctggcatctccctggaggccctgggcctggcccgaggctcagcccggatctgcagttgccaggtcagtgcggggcccggagtggattcgcggggcggggcggggcactgyccgcgcccggagctcagcagcagctgcccaggggcgggggcggcaagacgcggaagtgcccggcaggttggcggaccggcgggaggcgcagcctgggcagagctcagcttggtcccgccgcccggccggtgctccctggcgcagccacgcaggcgcaccgcagacaggtgggtcccggccgccgcgctctcctctctgcgtccgcgcccggcgcgccccgagggtggcgggagcggtgccggctactgcccccaagtctaggcctagactgggscccgcgccccccaggcactgcgggcggcgggatgaagactggagtagggcggggtccgcgtccagctgcgcctggaaagcgagctcgggkgggtgcctacagcagggtgcgcccggccggcctgggacttccaaagcgcctcccacgccccgatcggtttggggtgctggcgcccggggagcccagtgacccaggcggcggagtgggcagcgctgcggggggcgccggctctgctgctctccctccccctcgccatcgcccagaatgggggttcccgggagccccgctggaggctggcttggaccacagaggagcgaggcccgatccttactttcgatgcactcgcccttgctcttaccgggccaccctcaccctttcggaaaagaggttgaggttaaagcgttcatcccccgggatcttcaggccaatggcaggaactgtgcaagagtttgggggaagatggtgtcaggtagaggctgcgtccctgggctcgcggccgggaatggcagactctcgtcccccgagcagcggaaaaggatggggcgcaatagttcctgggctggtttcctcaggtcctgtcccagaacttaagaaggcaacaatgaagaggctaaacgtggaggaaaagtgaggctagcatggccgggatgcgtggggagatggttgtctccggaccccgggaggggcgggagcgggtacctgggagcagaggctggagtgggggactttcccagcctcgcggccacgctgaacacagcagggcgaggaccggggtgctgctcctccagcagcaggaggagaggtccagaggccgactctggaggtgggggtggctccgcgggctggcccagggggtgtgccccagcggagcacgcgggaggggtggagcaggggcggaggactgggctgggcctgggctcctcgagggcccagaatggggataagtgaccagaaccagagagggctcggctgyatcgatgtaggaaactgtagcccctcaggaggccctctggcaagacctccccttcctgcccccacccccagtagttatggggcctggggtgctggggctgaggggttccaagagtcaagggaagcactgggaaatcacccctttttatctaaaggccctactttggggtttttcccctgtaccctggtcttcccctaccctgaccctgggaggaagcygaaagaagcttctttctgggcaccttttgccccagagcctcagcctgtctggaccaggtgggcagcagggcccagggtgtgggcagctgacccggaggggtgggatttgggggtcagggcctgtacagggaaccccttgtcctctccctgagctgggtgtgggtttgcaaggagacatgtgacccagaccaaccctgggagcagcagggcgcctgctgtctggccactcttactaggactgctgtrgcacttcctcccctagtgggtccctggtgcccatgaattgcagctcctgggtggtggtgggggcactgtctcctgggactccagcatggccctggggtgagctgtgggcttaccccacctcagcaggtcctctagggctgcccactggatgcttcgctgcctcacacaattgtagggacttcctcaggctgttggatttccccaccttccggggctcaggtccattgacttaggtctagggctccatacatttcacccagagactccggagcctggcaggcagacctgttctgacaccgaacttccaaagtcatgggccttgattggggtggtctgaattagacctagcccttttctgggcagaagggagcttctrggagkwtggatgctgttcgggttagagctcgtgtggacctagctgcaggcaaaagccttgaggctgagtcccttctgtggcatggtggacagactctcgctcatcacagccgggcttgtcacgggagctcctcctccacacccctccctaagctgcctgtatggacgcggccctctgacactgaggtcggagttatcatttcaaaaccttgctctgtattaaacagccgtgttgggcagggccagactgctggactgacagtagggggcaggcagccggaccctctgagctccccaacggcaccagcgcctgcacggcctcagcccagggggtcattagggaagctctccccgattctgtgcagacagagcttcctctgtccacccttgctcggccagaattgtgtgccgctggtgactggcacccctctattctagggccaaggcctctcaggggtctacagatacaactatgggtgggtgcacacccatgttataaaccacactaaatgcacaaaaactgtctgcaagtttggggtgcggggaacagctctgggtgggaggttggaaatttggtctgggggacccactcggctccctccctcagcccacagtgagtctggtttctgagttgtccckgtctagccactttcgtttcccctggggccgggtggaggctggggcagaaagcggaactgagcccgcgtgttctgaggccagggcagggctggagcgttctgaacacctccccgtcccagcccctgggccaggcaagggccggccttacctctcctgggttggtggcagcagagctgggctctgagggaggcctgcaatgtgagacagtagcagctcagaggcggcactaggcaggtgcaaccccaaaaggtactgggcagggaatttcaggggaaactgaggctccatgctgcaaggccaaagcaggcccagacacagggagttcagctcgaacgtttgctccttacttgctgaccgacacattcacttctgatgggctgtgctgtgtaatgacccagtcctttctgtcttccacccaggggtctcaagtgaagggccaagggcatgggtaargggaggagagggacagaaggggactcaggactgtggagagtttccggttctgggctggagagggagttgggcaggtgaaggggaggaggcagggtccctctggcctgactccagggaggcagtgaagctgtggcctgggaggyggggctcgtgcccctgggtaggtagcagttagagctgtggcttctgtttcctgtagccttcctaacaggctccggcaggcgttagggccttcctaagtgctacccgaatgcgtgtccagtgggaggagaagggggaggaccaagaacctagatgaatggccctagagaggtaacatctgtttggtgcctgctgtcattggaggtgggttgagttggttgatgggatttctctaaagatattgagaaactgctttcctctgagggcaggtgtccttgggagctccagatgagattcttgttgagggcatctccggagggaactctcaggggatggagggtgagaaaacttgggcagggaagaatcgaactaggggtgtagactgagcaggaggctgtcttcgggctgatcccacagagcgctcgctgtcccaggtagccagcttgagacaagacagccgggcttttggtgtcaggcagtcactggctgtgggctgccccccaagagcaaggggtgggcctaacctgtggtgtgagtagtggaaggcggttctctggccarcgggctgcttgctgctgttagcagttggagaatggatgcctctgcccggtaaagggcacctggggccgcgcccgcagcattcactaactcgtaactctccttcccttcctccaaacacaaaattccatgacactagacaagaaagctgatgcttggaaaagagaattggccttaaatacctagatggactggagagaccatcctttgtggtccatagcttgacctctgagtaccctgtccccatccacctgcagacctgctgaggctcccctctggctttctcctgcagacccctctgccatgaaccagtccatcccagtggctcccaccccaccccgccgcgtgcggctgaagccctggctggtggcccaggtgaacagctgccagtacccagggcttcaatgggtcaacggggaaaagaaattattctgcatcccctggaggcatgccacaaggcatggtcccagccaggacggagataacaccatcttcaaggtaagccccggggaggaggttggctggacctccagggcaccctgtccccagaagaggagcgcacataacgcacacaggcagctcctcgaggctggccacccgcccagctaccatgctgctgctgatgccgggcccggactaaggggatgcagacgtagacacagggtacacctttttcctttttttttttttttaagacagagtctcgctctgtagcccaggctggagtgcagtggcacgatctcagctcactgcaacctctgcctcctgggttcaagcaattctcctgcctcagcctccygagtagctgggattacaggcatgagccaccacgcctggcctagggcacatcttttctaacctgcaccctagagcatcgtggggactgagggtccccagaaggccttcccataactcgtcctactcaccctttgctcgtctcactcctattactcatgaggacttgttcagtgcacgcatatgctaaaggaagccaacgatcatcatctttctaaaaattttatttttaaattagtatatatttatggggtacacagtggtgatttgataagcacagtgatcagatcaggtacttagcatatccataatctcaaacatttgtcatttctttgtgttgggaacaaactatttttaatataagattcagatacatcatcaatctttcaattgtttaaattttctaattttttttagagacagggcctcacactgttgaccagattccaattttttttttttttttttttttttttttgagacagggtctcactctgtcacccaggctggagtgcagtggcttgatctcagctcactgcagcctcgacctcccaggctcaggtgagtctcccatctcaacctccttgagtagctgggattacaggtgcctgccaccacaactggctaattttttgtacttttagtagagactttgccatgttgcccaggctggtcttgaactcctggactcaagcaatccacccacctcagcctcccagagtgctgggattacaggtgtgagccaccatgcccggcccaatctttttttttaattgatgtactacaactgtacatatatactctttttttttttttttgagatgagttgttgctctgttgcctagtgttgcaccattggtgagcagtggtgcagtcatagcacaacctccaactcagctcaagtgatcctccagtctcagcttcctgagtagccgtgactacaggtgcatgccaccatgcccagctaatttttttttttttttttgagatggagtcttgctttttcaccctagctggagtgcaatggcacaatctcagctcactgcaacctctgccacctgggttcaagcaattctcctgcctcagcctcccgagtagctaggattacaggcacctgccaccatgcccggctaatttttttttttttttttttttttttttttttttttgtatttttggtaaagacagggtttcaccctgttggccaggctggtcttgaactcctgacctcatgatccacctgccttggcctcccaaagtgctgggattacaggcgtgagccaccgtgcccagcctaattttttgattttgatatttgtaaagatgaggtctcactttgttgcccaggctggtctcaagctcatgggctcaagtgatcctcccacctcagcctcctgagtagctggtatcacaggcgcaagccactgtgctctctccaataatcttaatgctaggaygtacctcgcataatagtttttgcttacattttagtttttttgcacatgtgtgtatatggaatgcaaaattggaatcaagtgaatatcttgatttatagcctggatttttttcacccaatatcaggatcagctttcctttccaacatacgtccacatcacttttcgtgactgtagaatttccactggaatggtttagcacaatttggtcactgagtcttggtttttagatacttgagattgcttttaaaacctgaacttaaaaaccacattgtcatgtaggctgtcttaatgcttccctttttttcatcctcaattattttgggggttgatttcctagagttgaaaattgctgggtcaaaggcaatgcttattttttaaaactttgggtacatattttcttagtttttgggcttgatccttacctttccaaaattcttttgctaatccatttattttgtataggtaatacagtcacaaaattcaacattaaaaggcatagaatggtttagagcaaaaagtctccctccttccctggttcatcaccacccactcccctccctagcctttccctagaggcagccgtgttgtcattttcttgtttagccttcctgagagatttttatgcacatgtaagcaaatatggaactatcctttcctctacttttcataagaaatgctagatatctgcatatttgtctagacttaatacttcttgacgattgctacatgtcagcttataaacagtttcctgctttttctttttttgtgctgcccagtatttttcattcaatgggttggccgtaatttcaccagcccctcattgatggatgttgcattgggtattttgggtcatcttttacacacagcactgctgcgaataactttgtgtgtgcaatattttgtgtgaatgcttctatgatatttaggatgaattcctagaaatcaaatagctgggttaaaaggtagaaagaaatgttggtaaccctcacctcacctaattgccattcaaaataataccarcagctccagtgtctcgagcctgtcctatgtgcaggtttagctctgagtgctttacggacatcaactcccctcatcttttttgagatagggtatcactctgtcgtccaggctggagtgcagagcataatcatggctcactgcagccttgaactccccagctcaagcaatcctctcacctcagcctcctgagtagctgggaccacaggcacccaccactatgcccagctaattttttgtaaagacaggagtctcgttatgttgcctaggctggwctccaactcctgggctcaagcagtcctcccaccttggcctcccaaaatgttgggattacaggtgcgagccactgtgcccagccaacatcaaccccttgagtcttcgctgccactccatgaggtgggcaactgtgaggagatcaagacaaagggaggcagtgacatggcctggcacacagctggcggggggcacttccagattcaaacccagcctggctccagggtgctcacccttatccygcacgctgtcctccttagagatcacactgtttcaccctcccaggagcagggactatggatgcatctcatagcccctagatttcatgtagcttgctggcagcctgagggctggggcaggactgtggcagactcccacgctgcaaaccaggtctggggctcagcgaggctcagcctgtagccgaagttctccccacacagtagagtctcctatgggacaggaggcagactggggctgtggcagggatgaggttctctgtggtcggctatttcttcctgccccaggcctgggccaaggagacagggaaatacaccgaaggcgtggatgaagccgatccggccaagtggaaggccaacctgcgctgtgcccttaacaagagccgggacttccgcctcatctacgaygggccccgggacatgccacctcagccctacaagatctacgaggtctgctccaatggccctgctcccacaggtatcaggcctagcyctctgtgggccacctgggaggctgtgcaatgtcctggcccccagccatgagctcttgggtgcaggcaggccaagggcccctctagcaggcagtggtccaggaaacgatgcgggggctcccgctaggtcatgacacccagggcttccaggagtggctgggatgggtcactggcatatcaggaatggcttggcgtgcagtcagggacctgggtgcttcttccttaccattgccctcgttttggcttctggctccagcctaggtctcatggcccatggagtcggggaggtctttcccaatcctggtggctgtgccctccacctcgccctgtgttgggggcagctttggggaaggcagaagctgcataggagctacaggcagyctctcaggggatcttgcttctcctccgacattgactcctttactgccctgcttttctctccctgctgtgcagactcccagccccctgaggattactcttttggtgcaggagaggaggaggaagaagaggaagaggtgagtgtgggttgaggaggcaggtggagccctggacgagctctctgctgtccccatcggccttaggtttccgcagccccactcccatggagccccgtggccctctcaatagttctccttgtttcttctcctgggattctgaacgataggagcacagtccccacctgctccttcccagggcattgtcattaccctgtgtgtgtgacccacgcagcagttggggcttggtaggtctgactccctgcagaaggcaaatgaggaaagtgaggcaaagggcttttctgacctgcctgggatggacgagctgggaccggaggcagggtcttgcctgagctaaactgaggctaggggagttgcctcatagttctcgcctgttatttccccagccccaggtcagtggaataacctgtcctcctttytctcccatctcttccctcccttgctggtggtgtcccttcagctgcagaggatgttgccaagcctgagcctcacaggtggggccgggaggtggtggttgggggtctagtatacagagaagctataggtaccataggtacctggaagggggctgatgggaggctagggtggcccagggctgggaggaggtgtgcctgggaggcagttcgtggaggtggcactgacagccgtccacacgcactctctgtagatgcagtgcagtctggcccccacatgacaccctattctttactcaaagaggatgtcaagtggccgcccactctgcagccgcccactctgcggccgcctactctgcagccgcccactctgcrgccgcccgtggtgctgggtccccctgctccagaccccagccccctggctcctccccctggcaaccctgctggcttcagggagcttctctctgaggtcctggagcctgggcccctgcctgccagcctgccccctgcaggcgaacagctcctgccagacctgctgatcagcccccacatgctgcctcgtaaggacccatggctgggcacggggaagcagtgctgggggattggggtaggattggcaaggagggtggagggtgctggactcccttgggtgggaaaagtgggagggcggatggggctgggcctggccactgggctgcagaatggggaggcgtggggctcaaggacgggatgggcctgccttctgccccacagtgaccgacctggagatcaagtttcagtaccgggggcggccaccccgggccctcaccatcagcaacccccatggctgccggctcttctacagccagctggaggccacccaggagcaggtggaactcttcggccccataagcctggagcaagtgcgcttccccagccctgaggacatccccagtgacaagcagcgcttctacacgaaccagctgctggatgtcctggaccgcgggctcatcctccagctacagggccaggacctktatgccatccgcctgtgtcagtgcaaggtgttctggagcgggccttgtgcctcagcccatgactcatgccccaaccccatccagcgggaggtcaagaccaagcttttcagcctggagcattttctcaatggtgagggcccaaagctgtgatcctcctggctgcctcttgcccagggcatggttccagcctctgactagggaccttgattttgatgcagagctcatcctgttccaaaagggccagaccaacaccccaccacccttcgagatcttcttctgctttggggaagaatggcctgaccgcaaaccccgagagaagaagctcattactgtacaggtacatctcccctatcccaaagtcggccttggcttgaaaactggggaatcctggggctaggcccttgccccaggctggaggctcagggctccmtgagcagtgtgaacttggcggccagagaccatcaaggctcagagccggagaatgcggtctattactcacccctgatggctgtcctcatgcacagctggatctggcagccctgccacaggtctccctgtctcatctcctctttgcctcccaggtggtgcctgtagcagctcgactgctgctggagatgttctcaggggagctatcttggtcagctgatagtatccggctacagatctcaaacccagacctcaaagaccgcatggtggagcaattcaaggagctccatcacatctggcagtcccagcagcggttgcagcctgtggcccaggcccctcctggagcaggccttggtgttggccaggggccctggcctatgcacccagctggcatgcaataacaaggctgcagacggtgactggccctggcttcctgggtggcggtgcggactgatgtggagatgtgacagccccgatgagcwcctggctggctgcagggtcctacctctgggtttcctggaagtggatytgggccaagaaggagagggagaaaggcccgagcccctgccttcccgggcctttctctcctgggctgtctctggtctggtcagcctggctctcgggaaattcagccatgagcagggaaagaactctcccaaccctggggcctagctgtataggaggaattgcctaagggtggcccactcttgtgattgccccatttcctctggcaacaaaagccagagtgttgtgggccaagtccccccacagggcctctgcagggcatggccctgatttccctggtttgagactcacttcctcatctccctgtcctctgagataatatgagtgagcacttaggtatcatatcagatgctcaaggctggcagctacccccttcttgagagtccaagaacctggagcagaaataatttttatgtatttttggattaatgaatgttaaaaacagactcagctgtttctttccttttactactaccagttgctcccatgctgctccaccaggccctgtttcggatgccaactggcccactccccaagcacttgcccccagcttgcgaccattggcactgggagggcctggcttctgggctgatgggtcagttgggccttcataaacactcacctggctggctttgctttccaggaggaagctggctgaagcaagggtgtggaattttaaatgtgtgcacagtctggaaaactgtcagaatcagttttcccataaaagggtgggctagcattgcagctgcatttgggaccattcaaatctgtcactctcttgtgtatattcctgtgctattaaatatatcagggcagtgcatgtaaatcatcctgatatatttaatatatttattatattgtcccccgaggtggggacagtgagtgagttctcttagtccccccagagctggttgttaaagagcctggcacctacccgctctcacttcatctgtgtcatctctgcacactccagcccactttctgccttcagccattgagtggaagctgccccaggcccttaccaggtgcagatgcccaatcttgatgcccagccatcagaactgtgagccaaataaacctttttctgtataaattacccagcctcgggtcttcgtttacagcaacgcaaaatagattaaacccccataaatgttcaaggataccttgccccacagcctcgtccacagaatatattgtcactgtttggatttttgccaacctgacaggtgagatagtatctcagtgccacttctcattatcagcaaggctgagtagcttttcacatggttaagtggcctgtacagatttttttaaataattttagaatggttttagatttatggaaaagttcctaatagagttcctatggacccacactttctccaattgttaacatcttacattactatggcacacttgtgacaataatgaaaccatgtggacaattactatgaactcaacttctttatttggatttcatgagtttttcggatatcctttttctgttccaggatactatccaagatatcacattacattcacttgtcacatctccttagactcctctggtctatgacagtttcttagacttttcttgttgttggtcttgatggttttgaggaatactggccattttttaaagcatgtcccccagtttgggcttatctgatgtatttctcatttgtttttagagatagggtctttgtgttgcccaggctggagtgccatggtgcaaccttgaactcctgggctcagatgatcctcccacktagctgggactacgggtgcacaccaccacacctggctttttttttttgagacctggtctcaatatattgcccaggctggtctcaaactcctggcctcaagtgatcttcccaccgtggcctcccaaacagctgagattacaggtgtgaaccactgtgccccgcctgtttctcatggtttttgtatggaagaccacagaggtgaagcatcattcccactacatcatatcaagggtgcatactattaacctgatttatcactgtttctgactgaggtagtgataggttcctctatcatagttactcttcatcctccctgatctatatgtacacaggtaccgtggttttagtattattcacctgcatcctcttaaacttcaccaactagagtacagtgattacgtagtgctccttttgtcttagttttcaatcatttacaaaggtgtgcacctttttcttcacaggcctgtgcagttctactccctcttgcaattgtcaatgttttgagattaggagaagggagatgtcacatatctggtttccagcttcttccaaaaaactggcaaatatgaaaacactgtcatacattcctcaaaggcaaaaatcagctggaactctggatggggaatgttctcccagttcaatacggtcctctcctggcctgcttcctttcactgctctccgtgtccctaagggcatttgagtttgcaacccttgatgaatggtggagcagggagactgagtgtagatgaattggggaagcttggaagggccaggtgcccctcgcgaccacgagtgggctgacttccccagtactgctagcagttgagtaactgccaaaaatcttccctgaatttgtattaattggtttcctaaaactaaaatgaaaacagcaatgaaaacctggctgtcacttacagatctctgtgttgtagtagccagctgtggatgaacagtatccagaagtgacagatgtaacaaactccagaggtaaaggcaggccagtgtgaggtacaattcactgctcccaagccaggctagggctccccttggtaatagcttttggctgctctggtggcctgtgctggagcttaagttggaacccacaggaccttgatgcccacatcctggggatgaatgcatccctttagccccagcagtttctctcccttctttcaagctccttgtccccaccaagttcatccttataaccaactaaatataccctttttaagactctcagctctttgacataaagaacctaccctggccgggtgcagtggctcacgcctgtagtcccagcactttgggaggccgaggtgggcagatcacgaggtcaggagttcgagaccagcctggccaacatggtgaaaccccatctctactaaaaatacaaatattagctggtcatggtggtgggtgcctgtaatcctagctgctcaggaggctgaggcaggagaatcgctggaccccatcagacagaggttgcagtgagctgaaatcccaccattgcactccagcctgggcaacagagcaaggctccctctcaaaaaaaaaaaaacaaaaaaacaaaacaaaacaaaacaaaacaaaaggaaaaaaagaaaaaacgtacccttttcagtctctgtagagtagaagatatcaatggcttttcccatttttgctgaaagagcattcttggaaggcaatgttctcatttgctggtaatctatcccaaagaatcaggcacatcttgttgcaaaatcttgaacctttaaggtctcttggttttggctttcatcttatgattcacttaaatcagggccacacaaggtagacatttaaataaactcatgaatgttgatgccattcaaaagcacagtttcctttatgtcttaggtgtgcattctcagttactgttctttataacaattcccttcagatacataaggattacaagttactgtgttttagtacagtcttgctggaaatagccccaatgctgatgatctgtgttccacataatcatggccaacatttcatggctaatcctatcacggaacagacaattctgtggggagatgacttaggcaagttcaggtgcagttagctgacctgcccacatggacgggagatactcatcctatttctactagacaatgccatgcagaaacacagcatctccattaggtgagctgatcctgaacagttcctttttaaattaaaatctagatgggcatccttgctctgccgaaagtttcagagcagccctttcaaataatctgtaaggcttaagtaagcagtgaggttctgacaccattaacaacacagggctgtttgcaaagctatagctttagatatgcattccacatgctgtttttcagtggctaaggagggctgcattaagtcttccacacatttttttcagttccccacacaattgcctgtgaaaacagccaaattccttaaacagagcaaaatcaactggttatttcaaggacctatggttggacaaaacttaaaggttttattatttagccagaacatgagagggatggctggggtaatgtgctgatccctggaatctgatatcactctataaacactcaagtttttttctctccttctaatattgcctctttagagattaaaaccctgtgtaccactgatgttatgctggaagatttgtttcaccaattcctattgttctgtagcttgaggatttatgcccaggagtgaaaaagttaaagtgacaggcaaagaaaaggcagagaagtgtcagtatatcaacaacactgccagatctatcacattagaatacagctctgcaggtattagctcaaagcccaattgccataacagactgttatgattccatttattaaaaactcaggaaaatgcaaactaatctacagtgatagaaaacaaaccagtggttatgtggaaatggggatggatgggaagagggaggaaacaggtattacctaggggttcaaggaaacttttggaaataaagagtatgttcactaccctgattgtgataacggtttcatggatgtatcttatgtcaaagcttatcaaagtgtataccttaaacacatgcaaattatgttaatgatacttcaataaagtttttttttttaaagaccaataaatctgcaggtcaggaaactgtctacttgggtggccatagtagaaaaaccataccacactgtttaactgaaagagtaacccaactccctttcccactgaggctacacaaaagggtaaaatgtaagcgtgatgagctttggtgtgaattaggagaataaaaagtgcagaatgaaccacttccctgaagtctgaagggtctgtggcatcagggcaggggcctgccctttcaactccatccccagatgtctatcaggtaccaaaggctgcttccatagctagtctagctgaaccatttccgagctacaaggcagtgaatgaaagtaaaaacaaagaaacactggttaaattttaaaaatttattctttctcttttgttgctgttgatttgttcttgagatggctacaacaccagacagaacagtgccctcatatctgatggctgtgaagggctgcactcctttgaaacattaagatctgctttgggcttccctcttcggcctcaccctccccttaaaatcaagtcatttccacactttttagtaacatactaaatgacacatcatcccttgttagccctgtaaacattttttctccacacaccctccctctttttttctctcatgtctgtgggtgaataattcactaagaaaaaaaccttaaaaaacaaaaacttacacatttatatcctgcactccccacccacccgcccaccccagttttggctcttctctccaaggcagacaacaaactgatgtggattggaagtggactgagagaatgaacggggtcagggttcagatatccataaattctgaccctggcaggtcccgagcatcaccaatgtgaccacgatagaaagcagaacaagttccttgcttactcctccttgtctaaacaactctaaaggtgggaagaaacagctggggaaggtagaagaaatttctactcatttgcatttaaaaggaggggagagagaaagagaaggaagggtaggagaggaaagagaggacaaaacaatagaaaacctgaacaaatgaccctgaccctcttcttccaattgcagctatttaattcatgtgaatccccacattatccctaagtaaatattttgtttcacagaaagcttgtccttttgtttttctgtgtacacgtgcgcactggcgcttgtgcgtgtatgtgtgtgtgcgtgcatgtgtcatttgctaccaggtgaatgtttcagttctggtttctgtttagtcttccttttttttcttttttctttacttaaaattatttttccttttagaaagttcaccaggaaaccagctcccctcccaccacgccgggcaggccacagccatctttttaaaatccgcgctgattttccctcacacccccaaacaggaactcctcaggatggcctcagaaggctggagtctctccctgtctggcgggacaccctggtggcggtgaaggcccctctgccacaacggaggtttctgattgtgggacacagtctggtttttgttttcttcctgtcttctaattaaaaaagacattcctgacaaaagagataagacagtcaataactgcaccagaaaatagagcatttagtaaaatcaaccttaaggcagaggtttctatatttcctcaggtacctcattctgaagtctgccaataagaactcagaaaaaataaacaaataaataaaagtctggcgttttaacttgtgggttcaagggagctactgctttaatgagacaccgtctgcagtgtgcttccaatgctgagtgtgctgtggaaacaagggatgatgtgtcaggagggcaaagagccagcaggtccaggcctcccattccaaagcaaccagggaagctttgcctcagtctgctaaatcccacaggcttcatgtcgattttattttgaaagaaggctttgcctactaataacagttgaaaacaaaacaaaacaaaacaccaatttagatgctatcgaaaggatactgtattaagcg
